(19) United States
(12) Patent Application Publication
(10) Pub. No.: US 2025/0243263 A1
(43) Pub. Date: Jul. 31, 2025

(54) TAU BINDING COMPOUNDS

(71) Applicant: VOYAGER THERAPEUTICS, INC., Lexington, MA (US)

(72) Inventors: Vinodhbabu Kurella, Woburn, MA (US); Li Liu, West Roxbury, MA (US); Dillon Kavanagh, Cambridge, MA (US); Allan D. Capili, Somerville, MA (US); Jinzhao Hou, Lexington, MA (US); Todd Carter, Winchester, MA (US); Wencheng Liu, Cambridge, MA (US); Mathieu Emmanuel Nonnenmacher, Boston, MA (US); Tyler Christopher Moyer, Boston, MA (US); Jiangyu Li, Watertown, MA (US); Nilesh Navalkishor Pande, North Grafton, MA (US); Jeffrey Scott Thompson, Stoneham, MA (US)

(21) Appl. No.: 18/876,090

(22) PCT Filed: Jun. 21, 2023
(86) PCT No.: PCT/US2023/068827

§ 371 Date: Dec. 17, 2024

Related U.S. Application Data
(60) Provisional application No. 63/426,303, filed on Nov. 17, 2022.
(60) Provisional application No. 63/366,812, filed on Jun. 22, 2022.

(51) Int. Cl. C07K 16/18; A61K 39/395; A61K 48/00; C12N 15/86

(52) U.S. Cl. CPC C07K 16/18; A61K 39/3955; A61K 48/0058; C12N 15/86; C07K 2317/34; C07K 2317/76; C07K 2317/92; C07K 2317/94; C12N 2750/14143; C12N 2830/008; C12N 2830/50

(57) ABSTRACT

The present disclosure provides anti-tau antibodies and adeno-associated virus (AAV) particles with an AAV genome encoding anti-tau antibodies. Also provided are methods of using anti-tau antibodies and AAV particles for treatment and diagnosis of neurological indications.

### RELATED APPLICATIONS

[0001] This application claims priority to U.S. Provisional Application No. 63/366,812 filed on Jun. 22, 2022 and U.S. Provisional Application No. 63/426,303 filed on Nov. 17, 2022; the entire contents of each of which are hereby incorporated by reference in their entirety.

### SEQUENCE LISTING

[0002] The instant application contains a Sequence Listing which has been submitted electronically in XML format and is hereby incorporated by reference in its entirety. Said XML copy, created on Jun. 15, 2023, is named V2071-3004PCT_SL.xml and is 2,795,170 bytes in size.

### FIELD OF THE DISCLOSURE

[0003] The present disclosure presents tau binding compounds. In particular, the present disclosure provides antibodies which bind to tau (e.g., human tau), e.g., antibodies which bind to phospho-epitopes on human tau and adeno-associated virus (AAV) particles comprising a viral genome comprising a nucleotide sequence encoding an anti-tau antibody.

### BACKGROUND

[0004] Tauopathies are a group of neurodegenerative diseases characterized by the dysfunction and/or aggregation of the microtubule associated protein tau. Tau is normally a very soluble protein known to associate with microtubules based on the extent of its phosphorylation. Tau is considered a critical component of intracellular trafficking processes, particularly in neuronal cells, given their unique and extended structure. Hyperphosphorylation of tau depresses its binding to microtubules and microtubule assembly activity. Further, hyperphosphorylation of tau renders it prone to misfolding and aggregation. In tauopathies, the tau becomes hyperphosphorylated, misfolds and aggregates as neurofibrillary tangles (NFT) of paired helical filaments (PHF), twisted ribbons or straight filaments. These NFT are largely considered indicative of impending neuronal cell death and thought to contribute to widespread neuronal cell loss, leading to a variety of behavioral and cognitive deficits.

[0005] The first genetically defined tauopathy was described when mutations in the tau gene were shown to lead to an autosomal dominantly inherited tauopathy known as frontotemporal dementia and parkinsonism linked to chromosome 17 (FTDP-17). This was the first causal evidence that changes in tau could lead to neurodegenerative changes in the brain. These molecules are considered to be more amyloidogenic, meaning they are more likely to become hyperphosphorylated and more likely to aggregate into NFT (Hutton, M. et al., 1998, Nature 393(6686):702-5).

[0006] Several approaches have been proposed for therapeutically interfering with progression of tau pathology and preventing the subsequent molecular and cellular consequences. Given that NFT are composed of hyperphosphorylated, misfolded and aggregated forms of tau, interference at each of these stages has yielded a set of avidly pursued targets. Introducing agents that limit phosphorylation, block misfolding or prevent aggregation have all generated promising results. Passive and active immunization with late stage anti-phospho-tau antibodies in mouse models have led to dramatic decreases in tau aggregation and improvements in cognitive parameters. It has also been suggested that introduction of anti-tau antibodies can prevent the trans-neuronal spread of tau pathology.

[0007] There remains a need for anti-tau antibodies for use in tauopathy treatment, diagnostics, and other applications. The present disclosure addresses this need with related compounds and methods described herein.

### SUMMARY

[0008] Provided herein are isolated, e.g., recombinant, antibodies which bind to tau (e.g., human tau), or an AAV particle comprising a viral genome comprising a nucleotide sequence encoding an anti-tau antibody (e.g., an anti-tau antibody described herein). In particular, provided herein are anti-tau antibodies which are not only structurally unique, but also exhibit different binding patterns to various phospho-epitopes in tau compared to phospho-epitopes recognized by anti-tau antibodies widely used to study tau pathology (e.g., PT3 and AT8), despite binding to similar/overlapping regions in tau. In addition to therapeutic applications, the anti-tau antibodies provided herein, or an AAV particle comprising a viral genome comprising a nucleotide sequence encoding an anti-tau antibody (e.g., an anti-tau antibody described herein), may also serve as diagnostic tools for the detection of unique phosphorylation states of tau.

[0009] In some embodiments, the present disclosure provides an antibody, or an AAV particle comprising a viral genome comprising a nucleotide sequence encoding an anti-tau antibody (e.g., an anti-tau antibody described herein), that includes: a heavy chain variable domain (VH) with a complementarity determining region (CDR)H1, CDRH2, and CDRH3 including an amino acid sequence according to any of those listed in Table 4, or a fragment thereof; and a light chain variable domain (VL) with a CDRL1, CDRL2, and CDRL3 including an amino acid sequence according to any of those listed in Table 1, or a fragment thereof. The antibody may include a set of variable domain CDR amino acid sequences, wherein the variable domain CDR amino acid sequence set is selected from any of those listed in Table 1. The antibody may include a pair of variable domain CDR amino acid sequence sets, wherein the variable domain CDR amino acid sequence set pair is selected from any those listed in Table 1. The VH may include a framework region (FR)H1, FRH2, FRH3, and FRH4 that include an amino acid sequence selected from any of those listed in Table 1, or a fragment thereof. The VL may include a FRL1, FRL2, FRL3, and FRL4 that include an amino acid sequence selected from any of those listed in Table 1 or a fragment thereof. The VH may include an amino acid sequence selected from any of those listed in Table 1 and/or may be encoded by a nucleic acid sequence selected from any of those listed in Table 1. The VL may include an amino acid sequence selected from any of those listed in Table 1 and/or may be encoded by a nucleic acid sequence selected from any of those listed in Table 1. The antibody may include a variable domain pair selected from any of those listed in Table 1. The antibody may include a format selected from a monoclonal antibody, a multispecific antibody, a chimeric antibody, an antibody mimetic, a single chain Fv (scFv) format, and an antibody fragment. The antibody may include an antibody class selected from IgA, IgD, IgE, IgG, and IgM. The antibody may include one or more non-human constant domain. The antibody may include one or more human constant domain. The one or more human constant domain may be selected from any of those listed in Table 5. The antibody may include a human IgG, wherein the human IgG includes an isotype selected from IgG1, IgG2, IgG3, or IgG4. The antibody may be a human antibody. The antibody may bind to a tau protein epitope. The tau protein epitope may include or may be included within an amino acid sequence selected from any of those listed in Table 4. The tau protein epitope may include a region formed by a complex of at least two tau proteins. The antibody may bind to enriched paired helical filament tau protein (ePHF) with a half maximal effective concentration (EC50) of from about 0.01 nM to about 100 nM as determined by direct enzyme-linked immunosorbent assay (ELISA). The antibody may not bind to non-pathological tau. The antibody may bind to pathological tau tangles. The antibody may inhibit tau aggregation. The antibody may include a conjugate. The conjugate may include a therapeutic agent. The conjugate may include a detectable label.

[0010] In some embodiments, the present disclosure provides a construct encoding an antibody according to any of those described above or herein. In some embodiments, the present disclosure provides a construct (e.g., vector) comprising an AAV viral genome described herein.

[0011] In some embodiments, the present disclosure provides an AAV particle comprising a viral genome comprising a nucleotide sequence encoding an anti-tau antibody (e.g., an anti-tau antibody described herein).

[0012] In some embodiments, the present disclosure provides a method of treating a therapeutic indication in a subject, the method including administering to the subject an antibody according to any of those described above or herein, or an AAV particle comprising a viral genome comprising a nucleotide sequence encoding an anti-tau antibody (e.g., an anti-tau antibody described herein). The therapeutic indication may include a neurological indication. The neurological indication may include one or more of neurodegenerative disease, Alzheimer's disease (AD), frontotemporal dementia and parkinsonism linked to chromosome 17 (FTDP-17), frontotemporal lobar degeneration (FTLD), frontotemporal dementia (FTD), chronic traumatic encephalopathy (CTE), progressive supranuclear palsy (PSP), Down's syndrome, Pick's disease, corticobasal degeneration (CBD), corticobasal syndrome, amyotrophic lateral sclerosis (ALS), a prion disease, Creutzfeldt-Jakob disease (CJD), multiple system atrophy, tangle-only dementia, stroke, and progressive subcortical gliosis.

[0013] In some embodiments, the present disclosure provides a method of diagnosing a therapeutic indication in a subject, the method including the use of an antibody according to any of those described above or herein, or an AAV particle comprising a viral genome comprising a nucleotide sequence encoding an anti-tau antibody (e.g., an anti-tau antibody described herein). The therapeutic indication may include a neurological indication. The neurological indication may include one or more of neurodegenerative disease, AD, FTDP-17, FTLD, FTD, CTE, PSP, Down's syndrome, Pick's disease, CBD, corticobasal syndrome, ALS, a prion disease, CJD, multiple system atrophy, tangle-only dementia, stroke, and progressive subcortical gliosis. The antibody may be used to detect pathological tau in a subject tissue. The subject tissue may include CNS tissue. The subject tissue may include a thin tissue section. The thin tissue section may include a cryopreserved tissue section.

[0014] In another aspect, provided herein is an isolated, e.g., recombinant, AAV particle comprising an AAV capsid variant and a nucleic acid comprising a transgene encoding an antibody that binds to human tau (e.g., SEQ ID NO: 1404), wherein the AAV capsid variant comprises (a) the amino acid sequence of any of SEQ ID NO: 3648-3659, (b) an amino acid sequence comprising at least 5, 6, 7, 8, or 9 consecutive amino acids from the amino acid sequence of any of SEQ ID NO: 3648-3659, (c) an amino acid sequence comprising at least one, two, or three but no more than four modifications, e.g., substitutions, (e.g., conservative substitutions), insertions, or deletions, relative to the amino acid sequence of any of 3648-3659, or (d) an amino acid sequence comprising at least one, two, or three but no more than four different amino acids relative to the amino acid sequence of any of 3648-3659. In some embodiments, the capsid variant comprises the amino acid sequence of SEQ ID NO: 138, or an amino acid sequence with at least 95% sequence identity thereto.

[0015] In another aspect, provided herein is an isolated, e.g., recombinant, AAV particle comprising an AAV capsid variant and a nucleic acid comprising a transgene encoding an antibody that binds to human tau (e.g., SEQ ID NO: 1404), wherein the AAV capsid variant comprises: (i) the amino acid sequence of PLNGAVHLY (SEQ ID NO: 3648); (ii) an amino acid sequence comprising at least 5, 6, 7, 8, or 9 consecutive amino acids from the amino acid sequence of PLNGAVHLY (SEQ ID NO: 3648); (iii) an amino acid sequence comprising at least one, two, or three but no more than four modifications, e.g., substitutions (e.g., conservative substitutions), insertions, or deletions, relative to the amino acid sequence of PLNGAVHLY (SEQ ID NO: 3648); or (iv) an amino acid sequence comprising at least one, two, or three but no more than four different amino acids relative to the amino acid sequence of PLNGAVHLY (SEQ ID NO: 3648). In some embodiments, the capsid variant comprises the amino acid sequence of SEQ ID NO: 138, or an amino acid sequence with at least 95% sequence identity thereto.

[0016] In yet another aspect, provided herein is an isolated, e.g., recombinant, AAV particle comprising an AAV capsid variant and a nucleic acid comprising a transgene encoding an antibody that binds to human tau (e.g., SEQ ID NO: 1404), wherein the AAV capsid variant comprises an amino sequence comprising the following formula: [N1]-[N2], wherein: (i) [N1] comprises X1, X2, X3, X4, and X5, wherein: (a) position X1 is: P, Q, A, H, K, L, R, S, or T; (b) position X2 is: L, I, V, H, or R; (c) position X3 is: N, D, I, K, or Y; (d) position X4 is: G, A, C, R, or S; and (e) position X5 is: A, S, T, G, C, D, N, Q, V, or Y; and (ii) [N2] comprises the amino acid sequence of VHLY (SEQ ID NO: 4680), VHIY (SEQ ID NO: 4681), VHVY (SEQ ID NO: 4682), or VHHY (SEQ ID NO: 4683); and/or an amino acid modification, e.g., a conservative substitution, of any of the aforesaid amino acids in (i) and/or (ii).

[0017] In yet another aspect, provided herein is an isolated, e.g., recombinant, AAV particle comprising an AAV capsid variant and a nucleic acid comprising a transgene encoding an antibody that binds to human tau (e.g., SEQ ID NO: 1404), wherein the AAV capsid variant comprises one, two, three, four, or all of: (i) an [N1], wherein [N1] is or comprises: PLNGA (SEQ ID NO: 3679), SLNGA (SEQ ID NO: 4684), QLNGA (SEQ ID NO: 4685), ALNGA (SEQ ID NO: 4686), PLNGS (SEQ ID NO: 4687), PVNGA (SEQ ID NO: 4688), PLNGG (SEQ ID NO: 4689), PLNGT (SEQ ID NO: 4690), PLDGA (SEQ ID NO: 4691), QLNGS (SEQ ID NO: 4692), PLNGN (SEQ ID NO: 4693), SLDGA (SEQ ID NO: 4694), HLNGA (SEQ ID NO: 4695), ALNGT (SEQ ID NO: 4696), PINGA (SEQ ID NO: 4697), ALDGA (SEQ ID NO: 4698), PLNCA (SEQ ID NO: 4699), PLNGQ (SEQ ID NO: 4700), PLDSA (SEQ ID NO: 4701), RLDGA (SEQ ID NO: 4702), QLNGN (SEQ ID NO: 4703), PLNGY (SEQ ID NO: 4704), PLDSS (SEQ ID NO: 4705), PLNGC (SEQ ID NO: 4706), PLYGA (SEQ ID NO: 4707), TLNGA (SEQ ID NO: 4708), PVDGA (SEQ ID NO: 4709), PLKGA (SEQ ID NO: 4710), PLNGD (SEQ ID NO: 4711), KLDGA (SEQ ID NO: 4712), PHNGA (SEQ ID NO: 4713), PLNGV (SEQ ID NO: 4714), PLNAA (SEQ ID NO: 4715), QLNGY (SEQ ID NO: 4716), PLDGS (SEQ ID NO: 4717), LLNGA (SEQ ID NO: 4718), PLNRA (SEQ ID NO: 4719), PLIGA (SEQ ID NO: 4720), PRNGA (SEQ ID NO: 4721), or ALNGS (SEQ ID NO: 4722); (ii) an [N2] wherein [N2] is or comprises: VHLY (SEQ ID NO: 4680), VHVY (SEQ ID NO: 4682), VPLY (SEQ ID NO: 4723), VNLY (SEQ ID NO: 4724), VHRY (SEQ ID NO: 4725), VHIY (SEQ ID NO: 4681), VHHY (SEQ ID NO: 4683), FHLY (SEQ ID NO: 4726), LHLY (SEQ ID NO: 4727), DHLY (SEQ ID NO: 4728), VQLY (SEQ ID NO: 4729), IHLY (SEQ ID NO: 4730), VDLY (SEQ ID NO: 4731), AHLY (SEQ ID NO: 4732), VLLY (SEQ ID NO: 4733), GHLY (SEQ ID NO: 4734), VRLY (SEQ ID NO: 4735), or VYLY (SEQ ID NO: 4736); (iii) an [N3] wherein [N3] is or comprises: AQAQ (SEQ ID NO: 4737), SQAQ (SEQ ID NO: 4738), AQPQ (SEQ ID NO: 4739), AQSQ (SEQ ID NO: 4740), AKAQ (SEQ ID NO: 4741), AHAQ (SEQ ID NO: 4742), AQAP (SEQ ID NO: 4743), DQAQ (SEQ ID NO: 4744), APAQ (SEQ ID NO: 4745), AQAK (SEQ ID NO: 4746), AQAH (SEQ ID NO: 4747), AQEQ (SEQ ID NO: 4748), ALAQ (SEQ ID NO: 4749), ARAQ (SEQ ID NO: 4750), or TQAQ (SEQ ID NO: 4751); (iv) an [N4] wherein [N4] is or comprises: TGW, TGL, TGS, TGG, TAW, TGR, TAS, LSS, TSS, SSL, SSS, TLS, TVS, VSS, TSP, VSP, TMS, LSP, VAS, TAL, TTS, TLP, VLP, RGW, LSG, LAS, SSP, LLP, STS, TSA, TTP, SAL, LGS, VTP, VSA, IGW, TGF, LTP, TLA, LSA, TVG, TAP, TMP, TSL, VQS, SSM, SLP, VSQ, RSS, TST, VMS, TTA, TQP, LST, LAP, TVA, RLS, TGY, TSG, TAG, VMP, TSQ, TMA, VGS, TSW, TGV, TGT, TLG, LMP, VQP, TGM, SMS, SQL, IGS, RSV, TAA, STP, LSQ, TAQ, TGP, ASP, VSG, SAP, TLQ, LQP, TAT, TGQ, ATS, IGG, VAA, TSM, TVW, TAM, TGA, VAT, QSP, TQA, VQA, RSP, LAT, VAQ, LAA, RST, RTL, LGT, LMS, LGP, RTS, SQP, VLG, SVS, TMQ, SAV, LAG, SGP, TNS, RLT, TTQ, SAA, TSV, RLG, RAS, STQ, CSP, SAG, ALP, VTS, ISP, SVG, LTS, TTT, RSG, TQL, LNP, TVQ, IAS, LAQ, LSR, LSN, TTG, TSN, SMA, TKS, SVA, TQQ, VQQ, RLP, SAM, TAV, TQW, SSR, TQT, VNS, RSA, LMG, RQS, LVG, VTA, RTT, SMG, VMA, TKP, SAQ, NSP, ATP, VAG, RGS, VKP, RMS, NLP, NAL, RTP, RQL, VQG, VTG, VST, NAS, RVE, ATG, AMS, RNS, VMQ, SMQ, LQQ, TMG, LGQ, TSH, AAP, RSQ, TYS, ITP, VAK, TQM, TKA, SQQ, ISG, VSR, RTA, RML, SQM, VAN, CTP, ISS, AGP, TAK, RTG, LHP, TMT, AQP, QAP, RQP, LKS, NTT, TSK, RYS, KSS, NTP, VGG, IAA, LMA, MAP, VHP, VLS, LAN, ATQ, TNA, TAN, VSN, AAA, AVG, LTA, SAN, RAG, RQG, TLR, LSH, SAF, RAA, IQP, ILG, VNG, SVQ, LSK, TNG, RTQ, TMN, RGG, TTR, VRP, VKA, LAR, NQP, TMK, TYA, TQK, TTK, IAG, TQN, LAH, NTQ, RQQ, RAQ, TKQ, TQH, TNQ, LMQ, VNA, VQT, TQR, VGK, VKQ, IQS, LQR, TMM, VGN, RIG, SAK, RIA, VQN, NVQ, RIP, NAQ, NMQ, TPS, LTN, VTK, PGW, LPP, SPP, TPA, TGC, VPP, TPT, TPW, TPP, RPP, TPQ, TPR, TPG, VPA, VPQ, RPG, KGW, TRW, TAR, IPP, RSL, LVP, KGS, VAP, KGG, KAW, PGS, TRL, or AGW; and/or (v) an [N5] wherein [N5] is or comprises: VQN, VKN, VQT, VQK, DQN, VQH, GQN, VQI, VHN, FQN, LQN, VLN, VRN, VQS, VQY, AQN, VEN, VQD, VPN, IQN, VKK, DKN, VKT, VQP, EQN, GQT, FQK, GHN, or VPH; and/or wherein the AAV capsid variant comprises an amino acid modification, e.g., a conservative substitution, of any of the aforesaid amino acids in (i)-(v).

[0018] In yet another aspect, provided herein is an isolated, e.g., recombinant, AAV particle comprising an AAV capsid variant and a nucleic acid comprising a transgene encoding an antibody that binds to human tau (e.g., SEQ ID NO: 1404), wherein the AAV capsid variant comprises one, two, three, four, or all of: (i) an [N1], wherein [N1] is or comprises: PLNGA (SEQ ID NO: 3679), SLNGA (SEQ ID NO: 4684), QLNGA (SEQ ID NO: 4685), ALNGA (SEQ ID NO: 4686), PLNGS (SEQ ID NO: 4687), PVNGA (SEQ ID NO: 4688), PLNGG (SEQ ID NO: 4689), PLNGT (SEQ ID NO: 4690), PLDGA (SEQ ID NO: 4691), QLNGS (SEQ ID NO: 4692), PLNGN (SEQ ID NO: 4693), SLDGA (SEQ ID NO: 4694), HLNGA (SEQ ID NO: 4695), ALNGT (SEQ ID NO: 4696), PINGA (SEQ ID NO: 4697), ALDGA (SEQ ID NO: 4698), PLNCA (SEQ ID NO: 4699), PLNGQ (SEQ ID NO: 4700), PLDSA (SEQ ID NO: 4701), RLDGA (SEQ ID NO: 4702), QLNGN (SEQ ID NO: 4703), PLNGY (SEQ ID NO: 4704), or PLDSS (SEQ ID NO: 4705); (ii) an [N2] wherein [N2] is or comprises: VHLY (SEQ ID NO: 4680) or VHVY (SEQ ID NO: 4682); (iii) an [N3] wherein [N3] is or comprises: AQAQ (SEQ ID NO: 4737), SQAQ (SEQ ID NO: 4738), AQPQ (SEQ ID NO: 4739), or AQSQ (SEQ ID NO: 4740); (iv) an [N4] wherein [N4] is or comprises: TGW, TGL, TGS, TGG, TAW, TGR, TAS, LSS, TSS, SSL, SSS, TLS, TVS, VSS, TSP, VSP, TMS, LSP, VAS, TAL, TTS, TLP, VLP, RGW, LSG, LAS, SSP, LLP, STS, TSA, TTP, SAL, LGS, VTP, VSA, IGW, TGF, LTP, TLA, LSA, TVG, TAP, TMP, TSL, VQS, SSM, SLP, VSQ, RSS, TST, VMS, TTA, TQP, LST, LAP, TVA, RLS, TGY, TSG, TAG, VMP, TSQ, TMA, VGS, TSW, TGV, TGT, TLG, LMP, VQP, TGM, SMS, SQL, IGS, RSV, TAA, STP, LSQ, TAQ, TGP, ASP, VSG, SAP, TLQ, LQP, TAT, TGQ, ATS, IGG, VAA, TSM, TVW, TAM, TGA, VAT, QSP, TQA, VQA, RSP, LAT, VAQ, LAA, RST, RTL, LGT, LMS, LGP, RTS, SQP, VLG, SVS, TMQ, SAV, LAG, SGP, TNS, RLT, TTQ, SAA, TSV, RLG, RAS, STQ, CSP, SAG, ALP, VTS, ISP, SVG, LTS, TTT, RSG, TQL, LNP, TVQ, IAS, LAQ, LSR, LSN, TTG, TSN, SMA, TKS, SVA, TQQ, VQQ, RLP, SAM, TAV, TQW, SSR, TQT, VNS, RSA, LMG, RQS, LVG, VTA, RTT, SMG, VMA, TKP, SAQ, NSP, ATP, VAG, RGS, VKP, RMS, NLP, NAL, RTP, RQL, VQG, VTG, VST, NAS, RVE, ATG, AMS, RNS, VMQ, SMQ, LQQ, TMG, LGQ, TSH, AAP, RSQ, TYS, ITP, VAK, TQM, TKA, SQQ, ISG, VSR, RTA, RML, SQM, VAN, CTP, ISS, AGP, TAK, RTG, LHP, TMT, AQP, QAP, RQP, LKS, NTT, TSK, RYS, KSS, NTP, VGG, IAA, LMA, MAP, VHP, VLS, LAN, ATQ, TNA, TAN, VSN, AAA, AVG, LTA, SAN, RAG, RQG, TLR, LSH, SAF, RAA, IQP, ILG, VNG, SVQ, LSK, TNG, RTQ, TMN, RGG, TTR, VRP, VKA, LAR, NQP, TMK, TYA, TQK, TTK, IAG, TQN, LAH, NTQ, RQQ, RAQ, TKQ, TQH, TNQ, LMQ, VNA, VQT, TQR, VGK, VKQ, IQS, LQR, TMM, VGN, RIG, SAK, RIA, VQN, NVQ, RIP, NAQ, NMQ, TPS, LTN, VTK, PGW, LPP, SPP, TPA, or TGC; and/or (v) an [N5] wherein [N5] is or comprises: VQN, VKN, VQT, VQK, DQN, VQH, GQN, VQI, VHN, FQN, LQN, VLN, VRN, VQS, VQY, AQN, VEN, VQD; and/or wherein the AAV capsid variant comprises an amino acid modification, e.g., a conservative substitution, of any of the aforesaid amino acids in (i)-(v).

[0019] In yet another aspect, provided herein is an isolated, e.g., recombinant, AAV particle comprising an AAV capsid variant and a nucleic acid comprising a transgene encoding an antibody that binds to human tau (e.g., SEQ ID NO: 1404), wherein the AAV capsid variant comprises [A][B](SEQ ID NO: 5438), wherein [A] comprises the amino acid sequence of PLNGA (SEQ ID NO: 3679), and [B] comprises X1, X2, X3, X4, wherein: (i) X1 is: V, I, L, A, F, D, or G; (ii) X2 is: H, N, Q, P, D, L, R, or Y; (iii) X3 is: L, H, I, R, or V; and (iv) X4 is Y; and/or wherein the AAV capsid variant comprises an amino acid modification, e.g., a conservative substitution, of any of the aforesaid amino acids in (i)-(iv). In some embodiments, the AAV capsid variant further comprises one, two, or all of an amino acid other than T at position 593 (e.g., a V, S, L, R, I, A, N, C, Q, M, P, or K), an amino acid other than G at position 594 (e.g., T, M, A, K, S, Q, V, I, R, N, P, L, H, or Y), and/or an amino acid other than W at position 595 (e.g., K, Q, S, P, C, A, G, N, T, R, V, M, H, L, E, F, or Y), relative to a reference sequence numbered according to the amino acid sequence of SEQ ID NO: 138.

[0020] In yet another embodiment, provided herein is an isolated, e.g., recombinant, AAV particle comprising an AAV capsid variant and a nucleic acid comprising a transgene encoding an antibody that binds to human tau (e.g., SEQ ID NO: 1404), wherein the AAV capsid variant comprises PLNGAVHLY (SEQ ID NO: 3648) and optionally wherein the AAV capsid variant further comprises one, two, or all of an amino acid other than T at position 593 (e.g., A, L, R, V, C, I, K, M, N, P, Q, S), an amino acid other than G at position 594 (e.g., M, S, A, Q, V, T, L, P, H, K, N, I, Y, or R), and/or an amino acid other than W at position 595 (e.g., S, P, T, A, G, L, Q, H, N, R, K, V, E, F, M, C, or Y), relative to a reference sequence numbered according to the amino acid sequence of SEQ ID NO: 138.

[0021] In yet another embodiment, provided herein is an isolated, e.g., recombinant, AAV particle comprising an AAV capsid variant and a nucleic acid comprising a transgene encoding an antibody that binds to human tau (e.g., SEQ ID NO: 1404), wherein the AAV capsid variant comprises an amino sequence comprising the amino acid sequence of PLNGAVHLY (SEQ ID NO: 3648); and which further comprises one, two, three, or all of: (i) the amino acid at position 593, relative to a reference sequence numbered according to the amino acid sequence of SEQ ID NO: 138, is: T, A, L, R, V, C, I, K, M, N, P, Q, or S; (ii) the amino acid at position 594, relative to a reference sequence numbered according to the amino acid sequence of SEQ ID NO: 138, is: G, M, S, A, Q, V, T, L, P, H, K, N, I, Y, or R; and/or (iii) the amino acid at position 595, relative to a reference sequence numbered according to the amino acid sequence of SEQ ID NO: 138, W, S, P, T, A, G, L, Q, H, N, R, K, V, E, F, M, C, or Y. In some embodiments, the AAV capsid variant does not comprise the amino acid sequence of TGW at positions 593-595, numbered according to SEQ ID NO: 138.

[0022] In yet another aspect, provided herein is an isolated, e.g., recombinant, AAV particle comprising an AAV capsid variant and a nucleic acid comprising a transgene encoding an antibody that binds to human tau (e.g., SEQ ID NO: 1404), wherein the AAV capsid variant comprises X1-X2-X3-X4-X5-X6-X7-X8-X9-X10-X11-X12-X13-X14-X15-X16-X17-X18-X19, wherein: (i) X1 is: P, A, D, E, F, G, H, K, L, N, Q, R, S, T, or V; (ii) X2 is: L, D, E, F, H, I, M, N, P, Q, R, S, or V; (iii) X3 is: N, A, D, E, G, H, I, K, Q, S, T, V, or Y; (iv) X4 is: G, A, C, D, E, P, Q, R, S, T, V, or W; (v) X5 is: A, C, D, E, F, G, H, I, K, N, P, Q, R, S, T, V, W, or Y; (vi) X6 is: V, A, C, D, E, F, G, H, I, K, L, M, N, Q, R, S, T, or Y; (vii) X7 is: H, A, D, E, G, I, K, L, M, N, P, Q, R, S, T, V, or Y; (viii) X8 is: L, A, D, E, F, G, H, I, K, M, N, P, Q, R, S, T, V, or Y; (ix) X9 is: Y, A, C, D, E, F, G, H, I, K, L, M, N, Q, R, S, T, V, or W; (x) X10 is: A, C, D, E, F, G, H, I, K, L, N, P, Q, R, S, T, V, or; Y; (xi) X11 is: Q, A, D, E, H, K, L, P, R, or T; (xii) X12 is: A, D, E, G, H, L, N, P, Q, R, S, T, or V; (xiii) X13 is: Q, E, H, K, L, P, R, or T; (xiv) X14 is: T, A, C, D, E, F, G, H, I, K, L, M, N, P, Q, R, S, V, W, or Y; (xv) X15 is: G, A, C, D, E, F, H, I, K, L, M, N, P, Q, R, S, T, V, W, or Y; (xvi) X16 is: W, A, C, D, E, F, G, H, I, K, L, M, N, P, Q, R, S, T, V, or Y; (xvii) X17 is: V, A, D, E, F, G, H, I, or L; (xviii) X18 is: Q, E, H, K, L, P, or R; and/or (xix) X19 is: N, D, H, I, K, P, S, T, or Y.

[0023] In yet another aspect, provided herein is an isolated, e.g., recombinant, AAV particle comprising an AAV capsid variant and a nucleic acid comprising a transgene encoding an antibody that binds to human tau (e.g., SEQ ID NO: 1404), wherein the AAV capsid variant comprises: (a) the amino acid sequence of any one of SEQ ID NOs: 139-1138; (b) an amino acid sequence comprising at least 3, 4, 5, 6, 7, 8, 9, 10, 11, 12, 13, 14, 15, 16, 17, or 18 consecutive amino acids from any one of SEQ ID NOs: 139-1138; (c) an amino acid sequence comprising at least one, two, or three but no more than four different amino acids, relative to the amino acid sequence of any one of SEQ ID NOs: 139-1138; or (d) an amino sequence comprising at least one, two, or three but no more than four modifications, e.g., substitutions (e.g., conservative substitutions), insertions, or deletions, relative to the amino acid sequence of any one of SEQ ID NOs: 139-1138. In some embodiments, the AAV capsid variant does not comprise the amino acid sequence of TGW at positions 593-595, relative to a reference sequence numbered according to the amino acid sequence of SEQ ID NO: 138.

[0024] Those skilled in the art will recognize or be able to ascertain using no more than routine experimentation, many equivalents to the specific embodiments of the invention described herein. Such equivalents are intended to be encompassed by the following enumerated embodiments.

### Enumerated Embodiments

[0025] E1. An isolated, e.g., recombinant, antibody that binds to human tau (e.g., SEQ ID NO: 1404), wherein the antibody comprises a heavy chain variable region (VH) comprising one, two, or three of a heavy chain complementary determining region 1 (HCDR1), a heavy chain complementary determining region 2 (HCDR2), and a heavy chain complementary determining region 3 (HCDR3), and/or a light chain variable region (VL) comprising one, two, or three of a light chain complementary determining region 1 (LCDR1), a light chain complementary determining region 2 (LCDR2), and a light chain complementary determining region 3 (LCDR3), e.g., CDR sequences according to the Chothia numbering system, wherein:
   [0026] (i) the HCDR1, HCDR2, HCDR3, LCDR1, LCDR2, and LCDR3 comprise the amino acid sequences of SEQ ID NO: 82, SEQ ID NO: 97, SEQ ID NO: 115, SEQ ID NO: 127, KIS, and SEQ ID NO: 1289, respectively;
   [0027] (ii) the HCDR1, HCDR2, HCDR3, LCDR1, LCDR2, and LCDR3 comprise the amino acid sequences of SEQ ID NO: 79, SEQ ID NO: 94, SEQ ID NO: 111, SEQ ID NO: 127, KIS, and SEQ ID NO: 1286, respectively;
   [0028] (iii) the HCDR1, HCDR2, HCDR3, LCDR1, LCDR2, and LCDR3 comprise the amino acid sequences of SEQ ID NO: 80, SEQ ID NO: 95, SEQ ID NO: 112, SEQ ID NO: 129, DVS, and SEQ ID NO: 1287, respectively;
   [0029] (iv) the HCDR1, HCDR2, HCDR3, LCDR1, LCDR2, and LCDR3 comprise the amino acid sequences of SEQ ID NO: 81, SEQ ID NO: 94, SEQ ID NO: 114, SEQ ID NO: 127, KIS, and SEQ ID NO: 1286, respectively;
   [0030] (v) the HCDR1, HCDR2, HCDR3, LCDR1, LCDR2, and LCDR3 comprise the amino acid sequences of SEQ ID NO: 82, SEQ ID NO: 101, SEQ ID NO: 119, SEQ ID NO: 132, KDS, and SEQ ID NO: 1294, respectively;
   [0031] (vi) the HCDR1, HCDR2, HCDR3, LCDR1, LCDR2, and LCDR3 comprise the amino acid sequences of SEQ ID NO: 77, SEQ ID NO: 92, SEQ ID NO: 109, SEQ ID NO: 127, KIS, and SEQ ID NO: 1284, respectively;
   [0032] (vii) the HCDR1, HCDR2, HCDR3, LCDR1, LCDR2, and LCDR3 comprise the amino acid sequences of SEQ ID NO: 78, SEQ ID NO: 93, SEQ ID NO: 110, SEQ ID NO: 128, GNS, and SEQ ID NO: 1285, respectively;
   [0033] (viii) the HCDR1, HCDR2, HCDR3, LCDR1, LCDR2, and LCDR3 comprise the amino acid sequences of SEQ ID NO: 78, SEQ ID NO: 96, SEQ ID NO: 113, SEQ ID NO: 130, DAS, and SEQ ID NO: 1288, respectively;
   [0034] (xi) the HCDR1, HCDR2, HCDR3, LCDR1, LCDR2, and LCDR3 comprise the amino acid sequences of SEQ ID NO: 83, SEQ ID NO: 98, SEQ ID NO: 116, SEQ ID NO: 131, DDS, and SEQ ID NO: 1290, respectively;
   [0035] (x) the HCDR1, HCDR2, HCDR3, LCDR1, LCDR2, and LCDR3 comprise the amino acid sequences of SEQ ID NO: 84, SEQ ID NO: 99, SEQ ID NO: 117, SEQ ID NO: 132, KDT, and SEQ ID NO: 1291, respectively;
   [0036] (xi) the HCDR1, HCDR2, HCDR3, LCDR1, LCDR2, and LCDR3 comprise the amino acid sequences of SEQ ID NO: 85, SEQ ID NO: 100, SEQ ID NO: 118, SEQ ID NO: 133, KVS, and SEQ ID NO: 1292, respectively;
   [0037] (xii) the HCDR1, HCDR2, HCDR3, LCDR1, LCDR2, and LCDR3 comprise the amino acid sequences of SEQ ID NO: 85, SEQ ID NO: 100, SEQ ID NO: 118, SEQ ID NO: 134, SEQ ID NO: 1283, and SEQ ID NO: 1293, respectively;
   [0038] (xiii) the HCDR1, HCDR2, HCDR3, LCDR1, LCDR2, and LCDR3 comprise the amino acid sequences of SEQ ID NO: 86, SEQ ID NO: 102, SEQ ID NO: 120, SEQ ID NO: 127, KIS, and SEQ ID NO: 1286, respectively;
   [0039] (xiv) the HCDR1, HCDR2, HCDR3, LCDR1, LCDR2, and LCDR3 comprise the amino acid sequences of SEQ ID NO: 87, SEQ ID NO: 103, SEQ ID NO: 121, SEQ ID NO: 132, KDS, and SEQ ID NO: 1295, respectively;
   [0040] (xv) the HCDR1, HCDR2, HCDR3, LCDR1, LCDR2, and LCDR3 comprise the amino acid sequences of SEQ ID NO: 78, SEQ ID NO: 104, SEQ ID NO: 122, SEQ ID NO: 135, DVS, and SEQ ID NO: 1296, respectively;
   [0041] (xvi) the HCDR1, HCDR2, HCDR3, LCDR1, LCDR2, and LCDR3 comprise the amino acid sequences of SEQ ID NO: 78, SEQ ID NO: 104, SEQ ID NO: 122, SEQ ID NO: 136, AAS, and SEQ ID NO: 1297, respectively;
   [0042] (xvii) the HCDR1, HCDR2, HCDR3, LCDR1, LCDR2, and LCDR3 comprise the amino acid sequences of SEQ ID NO: 88, SEQ ID NO: 105, SEQ ID NO: 123, SEQ ID NO: 1279, WAS, and SEQ ID NO: 1298, respectively;
   [0043] (xviii) the HCDR1, HCDR2, HCDR3, LCDR1, LCDR2, and LCDR3 comprise the amino acid sequences of SEQ ID NO: 89, SEQ ID NO: 106, SEQ ID NO: 124, SEQ ID NO: 1280, LGS, and SEQ ID NO: 1299, respectively;
   [0044] (xix) the HCDR1, HCDR2, HCDR3, LCDR1, LCDR2, and LCDR3 comprise the amino acid sequences of SEQ ID NO: 90, SEQ ID NO: 107, SEQ ID NO: 125, SEQ ID NO: 1281, WAS, and SEQ ID NO: 1300, respectively;
   [0045] (xx) the HCDR1, HCDR2, HCDR3, LCDR1, LCDR2, and LCDR3 comprise the amino acid sequences of SEQ ID NO: 91, SEQ ID NO: 108, SEQ ID NO: 126, SEQ ID NO: 1282, VGS, and SEQ ID NO: 1301, respectively;
   [0046] (xxi) the HCDR1, HCDR2, HCDR3, LCDR1, LCDR2, and LCDR3 comprise the amino acid sequences of any of the HCDR and LCDR sequences provided in Table 1; or
   [0047] (xxii) a variant, e.g., functional variant, of the antibodies of any one of (i)-(xxi), wherein any one, two, three, four, five or all of the HCDR1, HCDR2, HCDR3, LCDR1, LCDR2, and/or LCDR3 comprises one, two, or at most three substitutions (e.g., conservative substitutions); or wherein any one, two, three, four, five or all of the HCDR1, HCDR2, HCDR3, LCDR1, LCDR2, and/or LCDR3 comprises one, two, or at most three different amino acids relative to any of the sequences in (i)-(xxi).
[0048] E2. The antibody of embodiment E1, wherein the antibody comprises the HCDR1, HCDR2, and HCDR3 sequences of any one of (i)-(xxii).
[0049] E3. The antibody of embodiment E1 or E2, wherein the antibody comprises the LCDR1, LCDR2, and LCDR3 sequences of any one of (i)-(xxii).
[0050] E4. The antibody of any one of embodiments E1-E3, wherein the antibody comprises the HCDR1, HCDR2, HCDR3, LCDR1, LCDR2, and LCDR3 sequences of any one of (i)-(xxii).
[0051] E5. An isolated, e.g., recombinant, antibody that binds to human tau (e.g., SEQ ID NO: 1404), wherein the antibody comprises a heavy chain CDR1, CDR2, and CDR3, and/or a light chain CDR1, CDR2, and CDR3 of an antibody comprising a heavy chain variable region (VH) and light chain variable region (VL) comprising: (i) SEQ ID NOs: 1143 and 25, respectively; (ii) SEQ ID NOs: 3 and 21, respectively; (iii) SEQ ID NOs: 1140 and 22, respectively; (iv) SEQ ID NOs: 1142 and 24, respectively; (v) SEQ ID NOs: 11 and 30, respectively; (vi) SEQ ID NOs: 1 and 19, respectively; (vii) SEQ ID NOs: 2 and 20, respectively; (viii) SEQ ID NOs: 1141 and 23, respectively; (ix) SEQ ID NOs: 1144 and 26, respectively; (x) SEQ ID NOs: 1145 and 27, respectively; (xi) SEQ ID NOs: 10 and 28, respectively; (xii) SEQ ID NOs: 10 and 29, respectively; (xiii) SEQ ID NOs: 12 and 31, respectively; (xiv) SEQ ID NOs: 13 and 32, respectively; (xv) SEQ ID NOs: 14 and 33, respectively; (xvi) SEQ ID NOs: 14 and 34, respectively; (xvii) SEQ ID NOs: 15 and 35, respectively; (xviii) SEQ ID NOs: 16 and 36, respectively; (xix) SEQ ID NOs: 17 and 37, respectively; or (xx) SEQ ID NOs: 18 and 38, respectively.
[0052] E6. The antibody of embodiment E5, wherein the CDR sequences are based on the Kabat numbering system, Chothia numbering system, or IMGT numbering system.
[0053] E7. The antibody of any one of the preceding embodiments, which comprises a VH comprising:
   [0054] (i) the amino acid sequence of any VH provided in Table 1, or an amino acid sequence having at least 70%, 75%, 80%, 85%, 90%, 92%, 95%, 96%, 97%, 98%, or 99% sequence identity thereto;
   [0055] (ii) an amino acid sequence comprising at least one, two or three modifications, but not more than 30, 20 or 10 modifications relative to the amino acid sequence of any VH provided in Table 1; or
   [0056] (iii) an amino acid sequence comprising at least one, two or three, but not more than 30, 20 or 10 different amino acids relative to any one of the amino acid sequences of any VH sequences provided in Table 1.
[0057] E8. The antibody of any one of the preceding embodiments, which comprises a VH comprising:
   [0058] (i) the amino acid sequence of any of SEQ ID NOs: 1143, 3, 1140, 1142, and 11, or an amino acid sequence having at least 70%, 75%, 80%, 85%, 90%, 92%, 95%, 96%, 97%, 98%, or 99% sequence identity thereto;
   [0059] (ii) an amino acid sequence comprising at least one, two or three modifications, but not more than 30, 20 or 10 modifications of the amino acid sequence of any of SEQ ID NOs: 1143, 3, 1140, 1142, and 11;
   [0060] (iii) an amino acid sequence comprising at least one, two or three, but not more than 30, 20 or 10 different amino acids relative to any one of the amino acid sequences of any of SEQ ID NOs: 1143, 3, 1140, 1142, and 11; or
   [0061] (iv) an amino acid sequence encoded by a nucleotide sequence of any of SEQ ID NOs: 51, 55, 54, 52, 47, 39, 56, 41, 50, 49, 48, 46, 45, 44, 43, 42, 53, or 40, or a nucleotide sequence having at least 70%, 75%, 80%, 85%, 90%, 92%, 95%, 96%, 97%, 98%, or 99% sequence identity thereto.
[0062] E9. The antibody of any one of the preceding embodiments, which comprises a VL comprising:
   [0063] (i) the amino acid sequence of any VL provided in Table 1, or an amino acid sequence having at least 70%, 75%, 80%, 85%, 90%, 92%, 95%, 96%, 97%, 98%, or 99% sequence identity thereto;
   [0064] (ii) an amino acid sequence comprising at least one, two or three modifications, but not more than 30, 20 or 10 modifications relative to the amino acid sequence of any VL provided in Table 1;
   [0065] (iii) an amino acid sequence comprising at least one, two or three, but not more than 30, 20 or 10 different amino acids relative to any one of the amino acid sequences of any VL sequences provided in Table 1; or
   [0066] (iv) an amino acid sequence encoded by a nucleotide sequence of any VL provided in Table 1, or a nucleotide sequence having at least 70%, 75%, 80%, 85%, 90%, 92%, 95%, 96%, 97%, 98%, or 99% sequence identity thereto.
[0067] E10. The antibody of any one of the preceding embodiments, which comprises a VL comprising:
   [0068] (i) the amino acid sequence of any of SEQ ID NOs: 25, 21, 22, 24, and 30, or an amino acid sequence having at least 70%, 75%, 80%, 85%, 90%, 92%, 95%, 96%, 97%, 98%, or 99% sequence identity thereto;
   [0069] (ii) an amino acid sequence comprising at least one, two or three modifications, but not more than 30, 20 or 10 modifications of the amino acid sequence of any of SEQ ID NOs: 25, 21, 22, 24, and 30;
   [0070] (iii) an amino acid sequence comprising at least one, two or three, but not more than 30, 20 or 10 different amino acids relative to any one of the amino acid sequences of any of SEQ ID NOs: 25, 21, 22, 24, and 30; or
   [0071] (iv) an amino acid sequence encoded by a nucleotide sequence of any of SEQ ID NOs: 67, 75, 74, 72, 66, 57, 76, 59, 70, 69, 68, 65, 64, 62, 63, 61, 60, 73, or 58, or a nucleotide sequence having at least 70%, 75%, 80%, 85%, 90%, 92%, 95%, 96%, 97%, 98%, or 99% sequence identity thereto.
[0072] E11. The antibody of any one of the preceding embodiments, comprising:
   [0073] (i) a VH comprising:
      [0074] (a) the amino acid sequence of any VH provided in Table 1, or an amino acid sequence having at least 70%, 75%, 80%, 85%, 90%, 92%, 95%, 96%, 97%, 98%, or 99% sequence identity thereto;
      [0075] (b) an amino acid sequence comprising at least one, two or three modifications, but not more than 30, 20 or 10 modifications relative to the amino acid sequence of any VH provided in Table 1;
      [0076] (c) an amino acid sequence comprising at least one, two or three, but not more than 30, 20 or 10 different amino acids relative to any one of the amino acid sequences of any VH sequences provided in Table 1; or
      [0077] (d) an amino acid sequence encoded by a nucleotide sequence of any VH provided in Table 1, or a nucleotide sequence having at least 70%, 75%, 80%, 85%, 90%, 92%, 95%, 96%, 97%, 98%, or 99% sequence identity thereto; and
   [0078] (ii) a VL comprising:
      [0079] (a) the amino acid sequence of any VL provided in Table 1, or an amino acid sequence having at least 70%, 75%, 80%, 85%, 90%, 92%, 95%, 96%, 97%, 98%, or 99% sequence identity thereto;
      [0080] (b) an amino acid sequence comprising at least one, two or three modifications, but not more than 30, 20 or 10 modifications relative to the amino acid sequence of any VL provided in Table 1;
      [0081] (c) an amino acid sequence comprising at least one, two or three, but not more than 30, 20 or 10 different amino acids relative to any one of the amino acid sequences of any VL sequences provided in Table 1; or
      [0082] (d) an amino acid sequence encoded by a nucleotide sequence of any VL provided in Table 1, or a nucleotide sequence having at least 70%, 75%, 80%, 85%, 90%, 92%, 95%, 96%, 97%, 98%, or 99% sequence identity thereto.
[0083] E12. The antibody of any one of the preceding embodiments, comprising the amino acid sequence of any VH of an antibody provided in Table 1, and the amino acid sequence of the VL of the antibody provided in Table 1.
[0084] E13. The antibody of any one of the preceding embodiments, comprising:
   [0085] (i) a VH comprising the amino acid sequence of SEQ ID NO: 1143; an amino acid sequence having at least 70%, 75%, 80%, 85%, 90%, 92%, 95%, 96%, 97%, 98%, or 99% sequence identity thereto; an amino acid sequence comprising at least one, two or three, but not more than 30, 20 or 10 different amino acids relative to SEQ ID NO: 1143; or an amino acid sequence comprising at least one, two or three, but not more than 30, 20 or 10 modifications, e.g., substitutions (e.g., conservative substitutions) relative to SEQ ID NO: 1143; and
   [0086] (ii) a VL comprising the amino acid sequence of SEQ ID NO: 25, or an amino acid sequence having at least 70%, 75%, 80%, 85%, 90%, 92%, 95%, 96%, 97%, 98%, or 99% sequence identity thereto; an amino acid sequence comprising at least one, two or three, but not more than 30, 20 or 10 different amino acids relative to SEQ ID NO: 25; or an amino acid sequence comprising at least one, two or three, but not more than 30, 20 or 10 modifications, e.g., substitutions (e.g., conservative substitutions) relative to SEQ ID NO: 25.
[0087] E14. The antibody of any one of embodiments E1-E12, comprising:
   [0088] (i) a VH comprising the amino acid sequence of SEQ ID NO: 3; an amino acid sequence having at least 70%, 75%, 80%, 85%, 90%, 92%, 95%, 96%, 97%, 98%, or 99% sequence identity thereto; an amino acid sequence comprising at least one, two or three, but not more than 30, 20 or 10 different amino acids relative to SEQ ID NO: 3; or an amino acid sequence comprising at least one, two or three, but not more than 30, 20 or 10 modifications, e.g., substitutions (e.g., conservative substitutions) relative to SEQ ID NO: 3; and
   [0089] (ii) a VL comprising the amino acid sequence of SEQ ID NO: 21, or an amino acid sequence having at least 70%, 75%, 80%, 85%, 90%, 92%, 95%, 96%, 97%, 98%, or 99% sequence identity thereto; an amino acid sequence comprising at least one, two or three, but not more than 30, 20 or 10 different amino acids relative to SEQ ID NO: 21; or an amino acid sequence comprising at least one, two or three, but not more than 30, 20 or 10 modifications, e.g., substitutions (e.g., conservative substitutions) relative to SEQ ID NO: 21.
[0090] E15. The antibody of any one of embodiments E1-E12, comprising:
   [0091] (i) a VH comprising the amino acid sequence of SEQ ID NO: 4; an amino acid sequence having at least 70%, 75%, 80%, 85%, 90%, 92%, 95%, 96%, 97%, 98%, or 99% sequence identity thereto; an amino acid sequence comprising at least one, two or three, but not more than 30, 20 or 10 different amino acids relative to SEQ ID NO: 4; or an amino acid sequence comprising at least one, two or three, but not more than 30, 20 or 10 modifications, e.g., substitutions (e.g., conservative substitutions) relative to SEQ ID NO: 4; and
   [0092] (ii) a VL comprising the amino acid sequence of SEQ ID NO: 22, or an amino acid sequence having at least 70%, 75%, 80%, 85%, 90%, 92%, 95%, 96%, 97%, 98%, or 99% sequence identity thereto; an amino acid sequence comprising at least one, two or three, but not more than 30, 20 or 10 different amino acids relative to SEQ ID NO: 22; or an amino acid sequence comprising at least one, two or three, but not more than 30, 20 or 10 modifications, e.g., substitutions (e.g., conservative substitutions) relative to SEQ ID NO: 22.
[0093] E16. The antibody of any one of embodiments E1-E12, comprising:
   [0094] (i) a VH comprising the amino acid sequence of SEQ ID NO: 6; an amino acid sequence having at least 70%, 75%, 80%, 85%, 90%, 92%, 95%, 96%, 97%, 98%, or 99% sequence identity thereto; an amino acid sequence comprising at least one, two or three, but not more than 30, 20 or 10 different amino acids relative to SEQ ID NO: 6; or an amino acid sequence comprising at least one, two or three, but not more than 30, 20 or 10 modifications, e.g., substitutions (e.g., conservative substitutions) relative to SEQ ID NO: 6; and
   [0095] (ii) a VL comprising the amino acid sequence of SEQ ID NO: 22, or an amino acid sequence having at least 70%, 75%, 80%, 85%, 90%, 92%, 95%, 96%, 97%, 98%, or 99% sequence identity thereto; an amino acid sequence comprising at least one, two or three, but not more than 30, 20 or 10 different amino acids relative to SEQ ID NO: 24; or an amino acid sequence comprising at least one, two or three, but not more than 30, 20 or 10 modifications, e.g., substitutions (e.g., conservative substitutions) relative to SEQ ID NO: 24.
[0096] E17. The antibody of any one of embodiments E1-E12, comprising:
   [0097] (i) a VH comprising the amino acid sequence of SEQ ID NO: 11; an amino acid sequence having at least 70%, 75%, 80%, 85%, 90%, 92%, 95%, 96%, 97%, 98%, or 99% sequence identity thereto; an amino acid sequence comprising at least one, two or three, but not more than 30, 20 or 10 different amino acids relative to SEQ ID NO: 11; or an amino acid sequence comprising at least one, two or three, but not more than 30, 20 or 10 modifications, e.g., substitutions (e.g., conservative substitutions) relative to SEQ ID NO: 11; and
   [0098] (ii) a VL comprising the amino acid sequence of SEQ ID NO: 30, or an amino acid sequence having at least 70%, 75%, 80%, 85%, 90%, 92%, 95%, 96%, 97%, 98%, or 99% sequence identity thereto; an amino acid sequence comprising at least one, two or three, but not more than 30, 20 or 10 different amino acids relative to SEQ ID NO: 30; or an amino acid sequence comprising at least one, two or three, but not more than 30, 20 or 10 modifications, e.g., substitutions (e.g., conservative substitutions) relative to SEQ ID NO: 30.
[0099] E18. An isolated, e.g., recombinant, antibody that binds to human tau (e.g., SEQ ID NO: 1404), wherein the antibody comprises a heavy chain variable region (VH) and/or a light chain variable region (VL) comprising: (i) SEQ ID NOs: 1143 and/or 25, respectively; (ii) SEQ ID NOs: 3 and/or 21, respectively; (iii) SEQ ID NOs: 1140 and/or 22, respectively; (iv) SEQ ID NOs: 1142 and/or 24, respectively; (v) SEQ ID NOs: 11 and/or 30, respectively; (vi) SEQ ID NOs: 1 and/or 19, respectively; (vii) SEQ ID NOs: 2 and/or 20, respectively; (viii) SEQ ID NOs: 1141 and/or 23, respectively; (ix) SEQ ID NOs: 1144 and/or 26, respectively; (x) SEQ ID NOs: 1145 and/or 27, respectively; (xi) SEQ ID NOs: 10 and/or 28, respectively; (xii) SEQ ID NOs: 10 and/or 29, respectively; (xiii) SEQ ID NOs: 12 and/or 31, respectively; (xiv) SEQ ID NOs: 13 and/or 32, respectively; (xv) SEQ ID NOs: 14 and/or 33, respectively; (xvi) SEQ ID NOs: 14 and/or 34, respectively; (xvii) SEQ ID NOs: 15 and/or 35, respectively; (xviii) SEQ ID NOs: 16 and/or 36, respectively; (xix) SEQ ID NOs: 17 and/or 37, respectively; (xx) SEQ ID NOs: 18 and/or 38, respectively; (xxi) a variant, e.g., functional variant, of the antibodies of any one of (i)-(xx), wherein the VH and/or VL has an amino acid sequence having at least 70%, 75%, 80%, 85%, 90%, 92%, 95%, 96%, 97%, 98%, or 99% sequence identity thereto; or (xxii) a variant, e.g., functional variant, of the antibodies of any one of (i)-(xx), wherein the VH and/or VL comprises at least one, two, or three modifications, but not more than 30, 20, or 10 modifications (e.g., amino acid substitutions, e.g., conservative substitutions) or wherein the VH and/or VL comprises at least one, two, or three, but not more than 30, 20, or 10 different amino acids.
[0100] E19. The antibody of any one of embodiments E1-E18, wherein the antibody comprises the VH and VL sequences of any one of (i)-(xxii) in embodiment E17.
[0101] E20. The antibody of any one of embodiments E1-E19, which binds to a tau protein at a half maximal effective concentration (EC50) of from about 0.001 nM to about 10 nM, or about 0.01 nM to about 2 nM, e.g., as assessed by direct enzyme-linked immunosorbent assay (ELISA).
[0102] E21. The antibody of any one of embodiments E1-E20, which binds to enriched paired helical filament tau protein (ePHF), e.g., at a half maximal effective concentration (EC50) of from about 0.001 nM to about 100 nM, or about 0.01 nM to about 20 nM e.g., as assessed by direct enzyme-linked immunosorbent assay (ELISA).
[0103] E22. The antibody of any one of embodiments E1-E21, which binds to iPHF with a dissociation constant (K_{D}) of about 0.1 to about 10 nM, or about 0.2-5 nM, e.g., as assessed by bio-layer interferometry.
[0104] E23. The antibody of any one of the preceding embodiments, wherein the antibody binds to a tau protein epitope comprising a region formed by a complex of at least two tau proteins.
[0105] E24. The antibody of any one of the preceding embodiments, wherein the antibody binds to all or a portion of amino acid residues of tau selected from: (a) 183-212, (b) 187-218, (c) 33-82, 159-182, 197-226, and 229-246; (d) 217-242, (e) 35-76 and 187-218, (f) 5-34, (g) 187-218, (h) 33-82, 159-188, and 191-230, (i) 35-62, 107-124, and 203-220, (j) 35-82, 159-188, and 197-224, and (k) 53-78, 329-348, or 381-408, wherein human tau is numbered according to SEQ ID NO: 1404.
[0106] E25. An isolated, e.g., recombinant, antibody that binds to human tau (e.g., SEQ ID NO: 1404), wherein the antibody binds to all or a portion of amino acid residues of tau selected from: (a) 183-212, (b) 187-218, (c) 33-82, 159-182, 197-226, and 229-246; (d) 217-242, (e) 35-76 and 187-218, (f) 5-34, (g) 187-218, (h) 33-82, 159-188, and 191-230, (i) 35-62, 107-124, and 203-220, (j) 35-82, 159-188, and 197-224, or (k) 53-78, 329-348, and 381-408, wherein human tau is numbered according to SEQ ID NO: 1404.
[0107] E26. The antibody of embodiment E24 or E25, wherein one or more of the serines, threonines, and/or tyrosines in the stretch of amino acids selected from (a)-(k) are phosphorylated.
[0108] E27. The antibody of any one of embodiments E24-E26, wherein all of the serines, threonines, and/or tyrosines in the stretch of amino acids selected from (a)-(k) are phosphorylated.
[0109] E28. The antibody of any one of embodiments E25-E27, wherein the antibody comprises the HCDR1, HCDR2, HCDR3, LCDR1, LCDR2, and LCDR3 sequence of any one of (i)-(xxii) in embodiment E3.
[0110] E29. The antibody of any one of embodiments E25-E28, wherein the antibody comprises the VH and VL sequences of any one of (i)-(xxii) in embodiment E17.
[0111] E30. The antibody of any one of embodiments E1-E29, which binds to all or a portion of amino acids 195-215 of tau with a dissociation constant (K_{D}) of about 1 pM to about 50 pM, or about 1-25 pM, e.g., as assessed by bio-layer interferometry.
[0112] E31. The antibody of any one of embodiments E1-E29, which binds to all or a portion of amino acids 191-214 of tau phosphorylated at S199 with a dissociation constant (K_{D}) of about 0.1 nM to about 10 nM, or about 0.5-5 nM, e.g., as assessed by bio-layer interferometry.
[0113] E32. The antibody of any one of embodiments E1-E29, which binds to all or a portion of amino acids 217-234 of tau phosphorylated at T217, T220, and T231 with a dissociation constant (K_{D}) of about 0.1 nM to about 10 nM, or about 0.1-5 nM, e.g., as assessed by bio-layer interferometry.
[0114] E33. The antibody of any one of embodiments E1-E29, which binds to all or a portion of amino acids 225-240 of tau phosphorylated at T231 with a dissociation constant (K_{D}) of about 0.1 nM to about 25 nM, or about 0.1-15 nM, e.g., as assessed by bio-layer interferometry.
[0115] E34. An isolated, e.g., recombinant, antibody that binds to human tau phosphorylated at amino acid residue S404, or a peptide comprising or consisting of the amino acid sequence DHGAEIVYKSPVVSGDT(pS)PRHLSNVSSTG (SEQ ID NO: 1411), wherein p(S) corresponds to a phosphorylated serine residue.
[0116] E35. The antibody of embodiment E34, wherein the antibody comprises a heavy chain variable region (VH) comprising CDR1, CDR2, and CDR3 sequences comprising SEQ ID NOs: 89, 106, and 124, respectively, and a light chain variable region (VL) comprising CDR1, CDR2, and CDR3 sequences comprising SEQ ID NO: 1280, LGS, and SEQ ID NO: 1299, respectively.
[0117] E36. The antibody of embodiment E34 or E35, wherein the antibody comprises VH and VL sequences comprising SEQ ID NOs: 16 and 36, respectively.
[0118] E37. An isolated, e.g., recombinant, antibody that binds to:
   [0119] (a) human tau phosphorylated at amino acid residue S199, but not at amino acid residues S202 and T205,
   [0120] (b) human tau phosphorylated at amino acid residue S202, but not at amino acid residues S199 and T205,
   [0121] (c) human tau phosphorylated at amino acid residue T205, but not at amino acid residues S199 and S202,
   [0122] (d) human tau phosphorylated at a combination of amino acid residues S199 and T205, but not at amino acid residue S202 (e.g., wherein binding tau phosphorylated at a combination of S199 and T205 is at least 3-times stronger (e.g., at least 4-time stronger) than background (e.g., non-specific) level of binding, e.g., binding by hIgG1 isotype control),
   [0123] (e) human tau phosphorylated at a combination of amino acid residues S202 and T205, but not at amino acid residue S199, but not human tau phosphorylated at a combination of residues S199 and S202, but not T205,
   [0124] (f) human tau phosphorylated at a combination of amino acid residues (i) S202 and T205, but not S119, and (ii) S199 and T205, but not S202, at least 2 times (e.g., at least 3 times, at least 4 times, at least 5 times, 2-6 times, 2-5 times, 2-4 times, 2-3 times, 3-5 times or 4-5 times) more strongly than background (e.g., non-specific) level of binding, e.g., binding by hIgG1 isotype control).
   [0125] (g) human tau phosphorylated at a combination of amino acid residues (i) S199 and S202, but not T205, (ii) S202 and T205, but not S199, (iii) S199 and T205, but not S202, and (iv) S199, S202, and T205 (e.g., wherein binding to phosphorylated tau is at least 1.6-times stronger (e.g., at least 1.7 times, at least 1.8 times, at least 1.9 times, at least 2 times, at least 3 times, 1.6-3 times, 1.6-2 times stronger) than background (e.g., non-specific) level of binding, e.g., binding by hIgG1 isotype control),
   [0126] (h) a peptide comprising or consisting of the amino acid sequence SGDRSGYS(pS)PGSPGTPGSRSRTPS (SEQ ID NO: 1414),
   [0127] (i) a peptide comprising or consisting of the amino acid sequence SGDRSGYSSPG(pS)PGTPGSRSRTPS (SEQ ID NO: 1415),
   [0128] (j) a peptide comprising or consisting of the amino acid sequence SGDRSGYSSPGSPG(pT)PGSRSRTPS (SEQ ID NO: 1416), or
   [0129] (k) a peptide comprising or consisting of the amino acid sequence SGDRSGYS(pS)PGSPG(pT)PGSRSRTPS (SEQ ID NO: 1420) (e.g., wherein binding to the peptide is at least 3 times stronger (e.g., at least 4 times stronger) than background (e.g., non-specific) level of binding, e.g., binding by hIgG1 isotype control),
   [0130] (l) a peptide comprising or consisting of the amino acid sequence SGDRSGYSSPG(pS)PG(pT)PGSRSRTPS (SEQ ID NO: 1419), but not a peptide comprising or consisting of the amino acid sequence SGDRSGYS(pS)PG(pS)PGTPGSRSRTPS (SEQ ID NO: 1418),
   [0131] (m) peptides comprising or consisting of the amino acid sequences SGDRSGYSSPG(pS)PG(pT)PGSRSRTPS (SEQ ID NO: 1419) and SGDRSGYS(pS)PGSPG(pT)PGSRSRTPS (SEQ ID NO: 1420), wherein binding to the latter peptide is at least 2 times (e.g., at least 3 times, at least 4 times, at least 5 times, 2-6 times, 2-5 times, 2-4 times, 2-3 times, 3-5 times or 4-5 times) more stronger than background (e.g., non-specific) level of binding, e.g., binding by hIgG1 isotype control), or
   [0132] (n) peptides comprising or consisting of the amino acid sequences SGDRSGYS(pS)PG(pS)PGTPGSRSRTPS (SEQ ID NO: 1418), SGDRSGYSSPG(pS)PG(pT)PGSRSRTPS (SEQ ID NO: 1419), SGDRSGYS(pS)PGSPG(pT)PGSRSRTPS (SEQ ID NO: 1420), and SGDRSGYS(pS)PG(pS)PG(pT)PGSRSRTPS (SEQ ID NO: 1417) (e.g., wherein binding to the peptides is at least 1.6 times stronger (e.g., at least 1.7 times, at least 1.8 times, at least 1.9 times, at least 2 times, at least 3 times, 1.6-4 times, 1.6-3 times stronger) than background (e.g., non-specific) level of binding, e.g., binding by hIgG1 isotype control),
      [0133] wherein p(S) and p(T) correspond to a phosphorylated serine and phosphorylated threonine, respectively,
      [0134] optionally wherein binding is assessed, e.g., using one point ELISA as described in Example 7, and optionally wherein human tau has the sequence set forth in SEQ ID NO: 1404.
[0135] E38. The antibody of embodiment E37, wherein the antibody comprises:
   [0136] (a) a heavy chain variable region (VH) comprising CDR1, CDR2, and CDR3 sequences comprising the amino acid sequences of SEQ ID NOs: 82, 97, and 115, respectively, and a light chain variable region (VL) comprising CDR1, CDR2, and CDR3 sequences comprising the amino acid sequences of SEQ ID NO: 127, KIS, and SEQ ID NO: 1289, respectively;
   [0137] (b) a heavy chain variable region (VH) comprising CDR1, CDR2, and CDR3 sequences comprising the amino acid sequence of SEQ ID NOs: 79, 94, and 111, respectively, and a light chain variable region (VL) comprising CDR1, CDR2, and CDR3 sequences comprising the amino acid sequence of SEQ ID NO: 127, KIS, and SEQ ID NO: 1286, respectively;
   [0138] (c) a heavy chain variable region (VH) comprising CDR1, CDR2, and CDR3 sequences comprising the amino acid sequences of SEQ ID NOs: 81, 94, and 114, respectively, and a light chain variable region (VL) comprising CDR1, CDR2, and CDR3 sequences comprising the amino acid sequences of SEQ ID NO: 127, KIS, and SEQ ID NO: 1286, respectively;
   [0139] (d) a heavy chain variable region (VH) comprising CDR1, CDR2, and CDR3 sequences comprising the amino acid sequences of SEQ ID NOs: 77, 92, and 109, respectively, and a light chain variable region (VL) comprising CDR1, CDR2, and CDR3 sequences comprising the amino acid sequences of SEQ ID NO: 127, KIS, and SEQ ID NO: 1284, respectively; or
   [0140] (e) a heavy chain variable region (VH) comprising CDR1, CDR2, and CDR3 sequences comprising the amino acid sequences of SEQ ID NOs: 86, 102, and 120, respectively, and a light chain variable region (VL) comprising CDR1, CDR2, and CDR3 sequences comprising the amino acid sequences of SEQ ID NO: 127, KIS, and SEQ ID NO: 1286, respectively.
[0141] E39. The antibody of embodiment E37 or E38, wherein the antibody comprises a VH and a VL, wherein the VH and the VL comprise the amino acid sequence of:
   [0142] (a) SEQ ID NOs: 1143 and 25, respectively,
   [0143] (b) SEQ ID NOs: 1144 and 26, respectively,
   [0144] (c) SEQ ID NOs: 1142 and 24, respectively,
   [0145] (d) SEQ ID NOs: 1 and 19, respectively, or
   [0146] (e) SEQ ID NOs: 12 and 31, respectively.
[0147] E40. An isolated, e.g., recombinant, antibody that binds to:
   [0148] (a) human tau phosphorylated at amino acid residue S199, but not at amino acid residues S202 and T205, and wherein the antibody comprises a heavy chain variable region (VH) comprising CDR1, CDR2, and CDR3 sequences comprising SEQ ID NOs: 82, 97, and 115, respectively, and a light chain variable region (VL) comprising CDR1, CDR2, and CDR3 sequences comprising SEQ ID NO: 127, KIS, and SEQ ID NO: 1289, respectively;
   [0149] (b) human tau phosphorylated at amino acid residue S202, but not at amino acid residues S199 and T205, and wherein the antibody comprises (i) a heavy chain variable region (VH) comprising CDR1, CDR2, and CDR3 sequences comprising SEQ ID NOs: 79, 94, and 111, respectively, and a light chain variable region (VL) comprising CDR1, CDR2, and CDR3 sequences comprising SEQ ID NO: 127, KIS, and SEQ ID NO: 1286, respectively; (ii) a heavy chain variable region (VH) comprising CDR1, CDR2, and CDR3 sequences comprising SEQ ID NOs: 81, 94, and 114, respectively, and a light chain variable region (VL) comprising CDR1, CDR2, and CDR3 sequences comprising SEQ ID NOs 127, KIS, and SEQ ID NO: 1286, respectively; or (iii) a heavy chain variable region (VH) comprising CDR1, CDR2, and CDR3 sequences comprising SEQ ID NOs: 86, 102, and 120, respectively, and a light chain variable region (VL) comprising CDR1, CDR2, and CDR3 sequences comprising SEQ ID NO: 127, KIS, and SEQ ID NO: 1286, respectively;
   [0150] (c) human tau phosphorylated at amino acid residue T205, but not at amino acid residues S199 and S202, and wherein the antibody comprises (i) a heavy chain variable region (VH) comprising CDR1, CDR2, and CDR3 sequences comprising SEQ ID NOs: 79, 94, and 111, respectively, and a light chain variable region (VL) comprising CDR1, CDR2, and CDR3 sequences comprising SEQ ID NO: 127, KIS, and SEQ ID NO: 1286, respectively; (ii) a heavy chain variable region (VH) comprising CDR1, CDR2, and CDR3 sequences comprising SEQ ID NOs: 81, 94, and 114, respectively, and a light chain variable region (VL) comprising CDR1, CDR2, and CDR3 sequences comprising SEQ ID NO: 127, KIS, and SEQ ID NO: 1286, respectively; or (iii) a heavy chain variable region (VH) comprising CDR1, CDR2, and CDR3 sequences comprising SEQ ID NOs: 86, 102, and 120, respectively, and a light chain variable region (VL) comprising CDR1, CDR2, and CDR3 sequences comprising SEQ ID NO: 127, KIS, and SEQ ID NO: 1286, respectively;
   [0151] (d) human tau phosphorylated at a combination of amino acid residues S199 and T205, but not at amino acid residue S202 (e.g., wherein binding tau phosphorylated at a combination of S199 and T205 is at least 3-times stronger (e.g., at least 4-time stronger) than background (e.g., non-specific) level of binding, e.g., binding by hIgG1 isotype control), and wherein the antibody comprises (i) a heavy chain variable region (VH) comprising CDR1, CDR2, and CDR3 sequences comprising SEQ ID NOs: 79, 94, and 111, respectively, and a light chain variable region (VL) comprising CDR1, CDR2, and CDR3 sequences comprising SEQ ID NO: 127, KIS, and SEQ ID NO: 1286, respectively; (ii) a heavy chain variable region (VH) comprising CDR1, CDR2, and CDR3 sequences comprising SEQ ID NOs: 81, 94, and 114, respectively, and a light chain variable region (VL) comprising CDR1, CDR2, and CDR3 sequences comprising SEQ ID NO: 127, KIS, and SEQ ID NO: 1286, respectively; (iii) a heavy chain variable region (VH) comprising CDR1, CDR2, and CDR3 sequences comprising SEQ ID NOs: 82, 97, and 115, respectively, and a light chain variable region (VL) comprising CDR1, CDR2, and CDR3 sequences comprising SEQ ID NO: 127, KIS, and SEQ ID NO: 1289, respectively; or (iv) a heavy chain variable region (VH) comprising CDR1, CDR2, and CDR3 sequences comprising SEQ ID NOs: 86, 102, and 120, respectively, and a light chain variable region (VL) comprising CDR1, CDR2, and CDR3 sequences comprising SEQ ID NO: 127, KIS, and SEQ ID NO: 1286, respectively;
   [0152] (e) human tau phosphorylated at a combination of amino acid residues S202 and T205, but not at amino acid residue S199, but not human tau phosphorylated at a combination of residues S199 and S202, but not T205, and wherein the antibody comprises a heavy chain variable region (VH) comprising CDR1, CDR2, and CDR3 sequences comprising SEQ ID NOs: 77, 92, and 109, respectively, and a light chain variable region (VL) comprising CDR1, CDR2, and CDR3 sequences comprising SEQ ID NO: 127, KIS, and SEQ ID NO: 1284, respectively;
   [0153] (f) human tau phosphorylated at a combination of amino acid residues (i) S202 and T205, but not S119, and (ii) S199 and T205, but not S202, at least 2 times (e.g., at least 3 times, at least 4 times, at least 5 times, 2-6 times, 2-5 times, 2-4 times, 2-3 times, 3-5 times or 4-5 times) more strongly than background (non-specific) level of binding, e.g., binding by hIgG1 isotype control), and wherein the antibody comprises (i) a heavy chain variable region (VH) comprising CDR1, CDR2, and CDR3 sequences comprising SEQ ID NOs: 79, 94, and 111, respectively, and a light chain variable region (VL) comprising CDR1, CDR2, and CDR3 sequences comprising SEQ ID NO: 127, KIS, and SEQ ID NO: 1286, respectively; (ii) a heavy chain variable region (VH) comprising CDR1, CDR2, and CDR3 sequences comprising SEQ ID NOs: 81, 94, and 114, respectively, and a light chain variable region (VL) comprising CDR1, CDR2, and CDR3 sequences comprising SEQ ID NOs: 127, KIS, and 1286, respectively; (iii) a heavy chain variable region (VH) comprising CDR1, CDR2, and CDR3 sequences comprising SEQ ID NOs: 82, 97, and 115, respectively, and a light chain variable region (VL) comprising CDR1, CDR2, and CDR3 sequences comprising SEQ ID NO: 127, KIS, and SEQ ID NO: 1289, respectively; or (iv) a heavy chain variable region (VH) comprising CDR1, CDR2, and CDR3 sequences comprising SEQ ID NOs: 86, 102, and 120, respectively, and a light chain variable region (VL) comprising CDR1, CDR2, and CDR3 sequences comprising SEQ ID NO: 127, KIS, and SEQ ID NO: 1286, respectively;
   [0154] (g) human tau phosphorylated at a combination of amino acid residues (i) S199 and S202, but not T205, (ii) S202 and T205, but not S199, (iii) S199 and T205, but not S202, and (iv) S199, S202, and T205 (e.g., wherein binding to phosphorylated tau is at least 1.6-times stronger (e.g., at least 1.7 times, at least 1.8 times, at least 1.9 times, at least 2 times, at least 3 times, 1.6-3 times, 1.6-2 times stronger) than background (non-specific) level of binding, e.g., binding by hIgG1 isotype control), and wherein the antibody comprises (i) a heavy chain variable region (VH) comprising CDR1, CDR2, and CDR3 sequences comprising SEQ ID NOs: 79, 94, and 111, respectively, and a light chain variable region (VL) comprising CDR1, CDR2, and CDR3 sequences comprising SEQ ID NO: 127, KIS, and SEQ ID NO: 1286, respectively; (ii) a heavy chain variable region (VH) comprising CDR1, CDR2, and CDR3 sequences comprising SEQ ID NOs: 81, 94, and 114, respectively, and a light chain variable region (VL) comprising CDR1, CDR2, and CDR3 sequences comprising SEQ ID NO: 127, KIS, and SEQ ID NO: 1286, respectively; (iii) a heavy chain variable region (VH) comprising CDR1, CDR2, and CDR3 sequences comprising SEQ ID NOs: 82, 97, and 115, respectively, and a light chain variable region (VL) comprising CDR1, CDR2, and CDR3 sequences comprising SEQ ID NO: 127, KIS, and SEQ ID NO: 1289, respectively; or (iv) a heavy chain variable region (VH) comprising CDR1, CDR2, and CDR3 sequences comprising SEQ ID NOs: 86, 102, and 120, respectively, and a light chain variable region (VL) comprising CDR1, CDR2, and CDR3 sequences comprising SEQ ID NO: 127, KIS, and SEQ ID NO: 1286, respectively;
   [0155] (h) a peptide comprising or consisting of the amino acid sequence SGDRSGYS(pS)PGSPGTPGSRSRTPS (SEQ ID NO: 1414), and wherein the antibody comprises a heavy chain variable region (VH) comprising CDR1, CDR2, and CDR3 sequences comprising SEQ ID NOs: 82, 97, and 115, respectively, and a light chain variable region (VL) comprising CDR1, CDR2, and CDR3 sequences comprising SEQ ID NOs: 127, KIS, and 1289, respectively
   [0156] (i) a peptide comprising or consisting of the amino acid sequence SGDRSGYSSPG(pS)PGTPGSRSRTPS (SEQ ID NO: 1415), and wherein the antibody comprises (i) a heavy chain variable region (VH) comprising CDR1, CDR2, and CDR3 sequences comprising SEQ ID NOs: 79, 94, and 111, respectively, and a light chain variable region (VL) comprising CDR1, CDR2, and CDR3 sequences comprising SEQ ID NO: 127, KIS, and SEQ ID NO: 1286, respectively; (ii) a heavy chain variable region (VH) comprising CDR1, CDR2, and CDR3 sequences comprising SEQ ID NOs: 81, 94, and 114, respectively, and a light chain variable region (VL) comprising CDR1, CDR2, and CDR3 sequences comprising SEQ ID NO: 127, KIS, and SEQ ID NO: 1286, respectively; or (iii) a heavy chain variable region (VH) comprising CDR1, CDR2, and CDR3 sequences comprising SEQ ID NOs: 86, 102, and 120, respectively, and a light chain variable region (VL) comprising CDR1, CDR2, and CDR3 sequences comprising SEQ ID NO: 127, KIS, and SEQ ID NO: 1286, respectively;
   [0157] (j) a peptide comprising or consisting of the amino acid sequence SGDRSGYSSPGSPG(pT)PGSRSRTPS (SEQ ID NO: 1416), and wherein the antibody comprises (i) a heavy chain variable region (VH) comprising CDR1, CDR2, and CDR3 sequences comprising SEQ ID NOs: 79, 94, and 111, respectively, and a light chain variable region (VL) comprising CDR1, CDR2, and CDR3 sequences comprising SEQ ID NO: 127, KIS, and SEQ ID NO: 1286, respectively; (ii) a heavy chain variable region (VH) comprising CDR1, CDR2, and CDR3 sequences comprising SEQ ID NOs: 81, 94, and 114, respectively, and a light chain variable region (VL) comprising CDR1, CDR2, and CDR3 sequences comprising SEQ ID NO: 127, KIS, and SEQ ID NO: 1286, respectively; or (iii) a heavy chain variable region (VH) comprising CDR1, CDR2, and CDR3 sequences comprising SEQ ID NOs: 86, 102, and 120, respectively, and a light chain variable region (VL) comprising CDR1, CDR2, and CDR3 sequences comprising SEQ ID NOs: 127, KIS, and SEQ ID NO: 1286, respectively;
   [0158] (k) a peptide comprising or consisting of the amino acid sequence SGDRSGYS(pS)PGSPG(pT)PGSRSRTPS (SEQ ID NO: 1420) (e.g., wherein binding to the peptide is at least 3 times stronger (e.g., at least 4 times stronger) than background (non-specific) level of binding, e.g., binding by hIgG1 isotype control), and wherein the antibody comprises (i) a heavy chain variable region (VH) comprising CDR1, CDR2, and CDR3 sequences comprising SEQ ID NOs: 79, 94, and 111, respectively, and a light chain variable region (VL) comprising CDR1, CDR2, and CDR3 sequences comprising SEQ ID NO: 127, KIS, and SEQ ID NO: 1286, respectively; (ii) a heavy chain variable region (VH) comprising CDR1, CDR2, and CDR3 sequences comprising SEQ ID NOs: 81, 94, and 114, respectively, and a light chain variable region (VL) comprising CDR1, CDR2, and CDR3 sequences comprising SEQ ID NO: 127, KIS, and SEQ ID NO: 1286, respectively; (iii) a heavy chain variable region (VH) comprising CDR1, CDR2, and CDR3 sequences comprising SEQ ID NOs: 82, 97, and 115, respectively, and a light chain variable region (VL) comprising CDR1, CDR2, and CDR3 sequences comprising SEQ ID NO: 127, KIS, and SEQ ID NO: 1289, respectively; or (iv) a heavy chain variable region (VH) comprising CDR1, CDR2, and CDR3 sequences comprising SEQ ID NOs: 86, 102, and 120, respectively, and a light chain variable region (VL) comprising CDR1, CDR2, and CDR3 sequences comprising SEQ ID NO: 127, KIS, and SEQ ID NO: 1286, respectively;
   [0159] (l) a peptide comprising or consisting of the amino acid sequence SGDRSGYSSPG(pS)PG(pT)PGSRSRTPS (SEQ ID NO: 1419), but not a peptide comprising or consisting of the amino acid sequence SGDRSGYS(pS)PG(pS)PGTPGSRSRTPS (SEQ ID NO: 1418), and wherein the antibody comprises a heavy chain variable region (VH) comprising CDR1, CDR2, and CDR3 sequences comprising SEQ ID NOs: 77, 92, and 109, respectively, and a light chain variable region (VL) comprising CDR1, CDR2, and CDR3 sequences comprising SEQ ID NO: 127, KIS, and SEQ ID NO: 1284, respectively
   [0160] (m) peptides comprising or consisting of the amino acid sequences SGDRSGYSSPG(pS)PG(pT)PGSRSRTPS (SEQ ID NO: 1419) and SGDRSGYS(pS)PGSPG(pT)PGSRSRTPS (SEQ ID NO: 1420), wherein binding to the latter peptide is at least 2 times (e.g., at least 3 times, at least 4 times, at least 5 times, 2-6 times, 2-5 times, 2-4 times, 2-3 times, 3-5 times or 4-5 times) more stronger than background (non-specific) level of binding, e.g., binding by hIgG1 isotype control), and wherein the antibody comprises (i) a heavy chain variable region (VH) comprising CDR1, CDR2, and CDR3 sequences comprising SEQ ID NOs: 79, 94, and 111, respectively, and a light chain variable region (VL) comprising CDR1, CDR2, and CDR3 sequences comprising SEQ ID NO: 127, KIS, and SEQ ID NO: 1286, respectively; (ii) a heavy chain variable region (VH) comprising CDR1, CDR2, and CDR3 sequences comprising SEQ ID NOs: 81, 94, and 114, respectively, and a light chain variable region (VL) comprising CDR1, CDR2, and CDR3 sequences comprising SEQ ID NO: 127, KIS, and SEQ ID NO: 1286, respectively; (iii) a heavy chain variable region (VH) comprising CDR1, CDR2, and CDR3 sequences comprising SEQ ID NOs: 82, 97, and 115, respectively, and a light chain variable region (VL) comprising CDR1, CDR2, and CDR3 sequences comprising SEQ ID NO: 127, KIS, and SEQ ID NO: 1289, respectively; or (iv) a heavy chain variable region (VH) comprising CDR1, CDR2, and CDR3 sequences comprising SEQ ID NOs: 86, 102, and 120, respectively, and a light chain variable region (VL) comprising CDR1, CDR2, and CDR3 sequences comprising SEQ ID NO: 127, KIS, and SEQ ID NO: 1286, respectively; or
   [0161] (n) peptides comprising or consisting of the amino acid sequences SGDRSGYS(pS)PG(pS)PGTPGSRSRTPS (SEQ ID NO: 1418), SGDRSGYSSPG(pS)PG(pT)PGSRSRTPS (SEQ ID NO: 1419), SGDRSGYS(pS)PGSPG(pT)PGSRSRTPS (SEQ ID NO: 1420), and SGDRSGYS(pS)PG(pS)PG(pT)PGSRSRTPS (SEQ ID NO: 1417) (e.g., wherein binding to the peptides is at least 1.6 times stronger (e.g., at least 1.7 times, at least 1.8 times, at least 1.9 times, at least 2 times, at least 3 times, 1.6-4 times, 1.6-3 times stronger) than background (non-specific) level of binding, e.g., binding by hIgG1 isotype control), and wherein the antibody comprises (i) a heavy chain variable region (VH) comprising CDR1, CDR2, and CDR3 sequences comprising SEQ ID NOs: 79, 94, and 111, respectively, and a light chain variable region (VL) comprising CDR1, CDR2, and CDR3 sequences comprising SEQ ID NO: 127, KIS, and SEQ ID NO: 1286, respectively; (ii) a heavy chain variable region (VH) comprising CDR1, CDR2, and CDR3 sequences comprising SEQ ID NOs: 81, 94, and 114, respectively, and a light chain variable region (VL) comprising CDR1, CDR2, and CDR3 sequences comprising SEQ ID NO: 127, KIS, and SEQ ID NO: 1286, respectively; (iii) a heavy chain variable region (VH) comprising CDR1, CDR2, and CDR3 sequences comprising SEQ ID NOs: 82, 97, and 115, respectively, and a light chain variable region (VL) comprising CDR1, CDR2, and CDR3 sequences comprising SEQ ID NO: 127, KIS, and SEQ ID NO: 1289, respectively; or (iv) a heavy chain variable region (VH) comprising CDR1, CDR2, and CDR3 sequences comprising SEQ ID NOs: 86, 102, and 120, respectively, and a light chain variable region (VL) comprising CDR1, CDR2, and CDR3 sequences comprising SEQ ID NO: 127, KIS, and SEQ ID NO: 1286, respectively;
      [0162] wherein p(S) and p(T) correspond to a phosphorylated serine and phosphorylated threonine, respectively,
      [0163] optionally wherein binding is assessed, e.g., using one point ELISA as described in Example 7, and optionally wherein human tau has the sequence set forth in SEQ ID NO: 1404.
[0164] E41. An isolated, e.g., recombinant, antibody that binds to:
   [0165] (a) tau phosphorylated at T217, but not at T212 or T214, or
   [0166] (b) peptides comprising or consisting of the sequences GTPGSRSRTPSLP(pT)PPTRE (SEQ ID NO: 1423) and GTPGSRSRTP(pS)LP(pT)PPTRE (SEQ ID NO: 1426), but not peptides comprising or consisting of the sequences GTPGSRSR(pT)PSLPTPPTRE (SEQ ID NO: 1421), GTPGSRSRTP(pS)LPTPPTRE (SEQ ID NO: 1422), and GTPGSRSR(pT)P(pS)LPTPPTRE (SEQ ID NO: 1424),
      [0167] wherein p(S) and p(T) correspond to a phosphorylated serine and phosphorylated threonine, respectively,
      [0168] optionally wherein binding of the antibody to tau or the peptide is at least 1.5 times stronger (e.g., at least 1.6 times, at least 1.7 times, at least 1.8 times, at least 1.9 times, at least 2 times, at least 3 times, at least 4 times, at least 5 times, at least 6 times, 1.5-4 times, 1.5-3, 4-6 times stronger) than background (non-specific) level of binding, e.g., binding by hIgG1 isotype control),
      [0169] optionally wherein binding of the antibody to tau or the peptide is assessed, e.g., using one point ELISA as described, e.g., in Example 8, and optionally wherein human tau has the sequence set forth in SEQ ID NO: 1404.
[0170] E42. The antibody of embodiment E41, wherein the antibody comprises:
   [0171] (a) a heavy chain variable region (VH) comprising CDR1, CDR2, and CDR3 sequences comprising SEQ ID NOs: 80, 95, and 112, respectively, and a light chain variable region (VL) comprising CDR1, CDR2, and CDR3 sequences comprising SEQ ID NO: 129, DVS, and SEQ ID NO: 1287, respectively;
   [0172] (b) a heavy chain variable region (VH) comprising CDR1, CDR2, and CDR3 sequences comprising SEQ ID NOs: 78, 104, and 122, respectively, and a light chain variable region (VL) comprising CDR1, CDR2, and CDR3 sequences comprising SEQ ID NO: 136, AAS, and SEQ ID NO: 1297, respectively; or
   [0173] (c) a heavy chain variable region (VH) comprising CDR1, CDR2, and CDR3 sequences comprising SEQ ID NOs: 90, 107, and 125, respectively, and a light chain variable region (VL) comprising CDR1, CDR2, and CDR3 sequences comprising SEQ ID NO: 1281, WAS, and SEQ ID NO: 1300, respectively.
[0174] E43. The antibody of embodiment E41 or E42, wherein the antibody comprises a VH and a VL, wherein the VH and the VL comprise the amino acid sequence of:
   [0175] (a) SEQ ID NOs: 1140 and 22, respectively,
   [0176] (b) SEQ ID NOs: 14 and 34, respectively, or
   [0177] (c) SEQ ID NOs: 17 and 37, respectively.
[0178] E44. The antibody of any one of the preceding embodiments, wherein the antibody is an IgA, IgD, IgE, IgG, or IgM antibody.
[0179] E45. The antibody of embodiment E44, wherein the antibody is an IgG antibody.
[0180] E46. The antibody of any one of the preceding embodiments, wherein the IgG is an isotype selected from IgG1, IgG2, IgG3, and IgG4.
[0181] E47. The antibody of embodiment E46, wherein the antibody is an IgG1 antibody.
[0182] E48. The antibody of any of the preceding embodiments, wherein the antibody comprises a heavy chain constant region selected from human IgG1, human IgG2, human IgG3, human IgG4, murine IgG1, murine IgG2a, murine IgG2b, murine IgG2c, and murine IgG3; and/or a light chain constant region selected from the light chain constant regions of kappa or lambda.
[0183] E49. The antibody of embodiment E48, wherein the antibody comprises a heavy chain constant region of human IgG1.
[0184] E50. The antibody of any one of the preceding embodiments, wherein the antibody comprises:
   [0185] (i) a heavy chain constant region (CH), e.g., a CH comprising an amino acid sequence of any of the heavy chain constant regions in Table 5, or a sequence having at least 80% (e.g., 85, 90, 95, 96, 97, 98, or 99%) sequence identity to the heavy chain constant region sequences in Table 5; an amino acid sequence comprising at least one, two or three modifications, but not more than 30, 20 or 10 modifications, relative to the amino acid sequence of the heavy chain constant region sequences in Table 5; or an amino acid sequence comprising at least one, two or three, but not more than 30, 20 or 10 different amino acids, relative to the amino acid sequence of the heavy chain constant region sequences in Table 5; and/or
   [0186] (ii) a light chain constant region (CL), e.g., a CL comprising an amino acid sequence of any of the CL sequences in Table 5, or a sequence having at least 80% (e.g., 85, 90, 95, 96, 97, 98, or 99%) sequence identity to any of the CL sequences in Table 5; an amino acid sequence comprising at least one, two or three modifications, but not more than 30, 20 or 10 modifications, relative to the amino acid sequence of the light chain constant region sequences in Table 5; an amino acid sequence comprising at least one, two or three, but not more than 30, 20 or 10 different amino acids, relative to the amino acid sequence of the light chain constant region sequences in Table 5.
[0187] E51. The antibody of any one of the preceding embodiments, wherein the antibody comprises an Fc region or variant, e.g., functional variant, thereof.
[0188] E52. The antibody of any one of the preceding embodiments, wherein the antibody comprises an Fc region which has modified, e.g., increased or reduced affinity (e.g., ablated), affinity for an Fc receptor, e.g., as compared to a reference, wherein the reference is a wild-type Fc receptor.
[0189] E53. The antibody of any one of embodiments E1-E52, wherein the antibody comprises an Fc region which comprises a mutation at one, two, or all of positions 1253 (e.g., I235A), H310 (e.g., H310A), and/or H435 (e.g., H435A), numbered according to the EU index as in Kabat.
[0190] E54. The antibody of any one of the preceding embodiments, wherein the antibody is a full-length antibody, a bispecific antibody, an intrabody, a Fab, a F(ab′)2, a Fv, a single chain Fv fragment (scFv), single domain antibody, or a camelid antibody.
[0191] E55. The antibody of any one of the preceding embodiments, wherein, in the antibody,
   [0192] (i) the VH and VL are connected directly, e.g., without a linker; or
   [0193] (ii) the VH and VL are connected via a linker.
[0194] E56. The antibody of embodiment E55, wherein the linker comprises a nucleotide sequence selected from any one of SEQ ID NOs: 1724-1739, 2244-2259, and 1455, 1456, 1457, 1458, 4253, 1469, or 1470, or a nucleotide sequence with at least 70%, 75%, 80%, 85%, 90%, 95%, or 99% sequence identity to a nucleotide sequence selected from any one of SEQ ID NOs: 1724-1739, 2244-2259, and 1455, 1456, 1457, 1458, 4253, 1469, or 1470.
[0195] E57. The antibody of any one of the preceding embodiments, wherein the antibody is a human, humanized, or chimeric antibody.
[0196] E58. The antibody of any one of the preceding embodiments, wherein the antibody comprises a signal sequence.
[0197] E59. The antibody of embodiment E58, wherein, in the antibody,
   [0198] (i) the signal sequence is located 5′ relative to the VH and/or the heavy chain; and/or
   [0199] (ii) the signal sequence is located 5′ relative to the VL and/or the light chain.
[0200] E60. The antibody of embodiment E58 or E59, wherein the signal sequence comprises an amino acid sequence selected from SEQ ID NOs: 1451-1468, or an amino acid sequence which is at least 70%, 75%, 80%, 85%, 90%, 95%, or 99% identical to any amino acid sequence selected from SEQ ID NOs: 1451-1468.
[0201] E61. The antibody of any one of the preceding embodiments, wherein the antibody comprises a second antigen-binding region having a different binding specificity than the antigen-binding region that binds to tau.
[0202] E62. The antibody of any one of the preceding embodiments, wherein the antibody is a multispecific antibody comprising at least a first antigen-binding domain and a second antigen-binding domain, e.g., a bispecific antibody.
[0203] E63. The antibody of any one of the preceding embodiments, wherein the antibody does not bind to non-pathological tau.
[0204] E64. The antibody of any one of the preceding embodiments, wherein the antibody binds to pathological tau tangles.
[0205] E65. The antibody of any one of the preceding embodiments, wherein the antibody inhibits tau aggregation.
[0206] E66. An isolated, e.g., recombinant, antibody that competes for binding to human tau with the antibody of any one of the preceding embodiments.
[0207] E67. An isolated, e.g., recombinant, antibody that binds to the same epitope, substantially the same epitope as, an epitope that overlaps with, or an epitope that substantially overlaps with, the epitope of the antibody of any one of the preceding embodiments.
[0208] E68. The antibody of any one of the preceding embodiments, wherein the antibody comprises a conjugate, e.g., a therapeutic agent or a detectable label.
[0209] E69. An isolated, e.g., recombinant, nucleic acid, or a combination of nucleic acids, encoding the antibody of any one of embodiments E1-E68.
[0210] E70. The nucleic acid, or combination of nucleic acids, of embodiment E69, comprising:
   [0211] (a) the nucleotide sequence of any VH provided in Table 1, or a nucleic acid sequence having at least 70%, 75%, 80%, 85%, 90%, 92%, 95%, 96%, 97%, 98%, or 99% sequence identity thereto; and/or
   [0212] (b) the nucleotide sequence of any VL provided in Table 1, or a nucleotide sequence having at least 70%, 75%, 80%, 85%, 90%, 92%, 95%, 96%, 97%, 98%, or 99% sequence identity thereto.
[0213] E71. The nucleic acid, or combination of nucleic acids, of any one of embodiments E69 or E70, comprising:
   [0214] (a) the nucleotide sequence of any one of SEQ ID NOs: 51, 55, 54, 52, 47, 39, 56, 41, 50, 49, 48, 46, 45, 44, 43, 42, 53, 40, or a nucleic acid sequence having at least 70%, 75%, 80%, 85%, 90%, 92%, 95%, 96%, 97%, 98%, or 99% sequence identity thereto; and/or
   [0215] (b) the nucleotide sequence of any one of SEQ ID NOs: 67, 75, 74, 72, 66, 57, 76, 59, 70, 69, 68, 65, 64, 62, 63, 61, 60, 73, 58, or a nucleotide sequence having at least 70%, 75%, 80%, 85%, 90%, 92%, 95%, 96%, 97%, 98%, or 99% sequence identity thereto.
[0216] E72. The isolated nucleic acid sequence of any one of embodiments E69-E71, wherein the nucleic acid sequence encoding the heavy chain variable region and/or the light chain variable region is codon-optimized.
[0217] E73. An adeno-associated virus (AAV) viral genome comprising a nucleotide sequence encoding an antibody that binds to human tau (e.g., SEQ ID NO: 1404), wherein the encoded antibody comprises a heavy chain variable region (VH) comprising one, two, or three of a heavy chain complementary determining region 1 (HCDR1), a heavy chain complementary determining region 2 (HCDR2), and a heavy chain complementary determining region 3 (HCDR3), and/or a light chain variable region (VL) comprising one, two, or three of a light chain complementary determining region 1 (LCDR1), a light chain complementary determining region 2 (LCDR2), and a light chain complementary determining region 3 (LCDR3), e.g., CDR sequences according to the Chothia numbering system, wherein:
   [0218] (i) the HCDR1, HCDR2, HCDR3, LCDR1, LCDR2, and LCDR3 comprise the amino acid sequences of SEQ ID NO: 82, SEQ ID NO: 97, SEQ ID NO: 115, SEQ ID NO: 127, KIS, and SEQ ID NO: 1289, respectively;
   [0219] (ii) the HCDR1, HCDR2, HCDR3, LCDR1, LCDR2, and LCDR3 comprise the amino acid sequences of SEQ ID NO: 79, SEQ ID NO: 94, SEQ ID NO: 111, SEQ ID NO: 127, KIS, and SEQ ID NO: 1286, respectively;
   [0220] (iii) the HCDR1, HCDR2, HCDR3, LCDR1, LCDR2, and LCDR3 comprise the amino acid sequences of SEQ ID NO: 80, SEQ ID NO: 95, SEQ ID NO: 112, SEQ ID NO: 129, DVS, and SEQ ID NO: 1287, respectively;
   [0221] (iv) the HCDR1, HCDR2, HCDR3, LCDR1, LCDR2, and LCDR3 comprise the amino acid sequences of SEQ ID NO: 81, SEQ ID NO: 94, SEQ ID NO: 114, SEQ ID NO: 127, KIS, and SEQ ID NO: 1286, respectively;
   [0222] (v) the HCDR1, HCDR2, HCDR3, LCDR1, LCDR2, and LCDR3 comprise the amino acid sequences of SEQ ID NO: 82, SEQ ID NO: 101, SEQ ID NO: 119, SEQ ID NO: 132, KDS, and SEQ ID NO: 1294, respectively;
   [0223] (vi) the HCDR1, HCDR2, HCDR3, LCDR1, LCDR2, and LCDR3 comprise the amino acid sequences of SEQ ID NO: 77, SEQ ID NO: 92, SEQ ID NO: 109, SEQ ID NO: 127, KIS, and SEQ ID NO: 1284, respectively;
   [0224] (vii) the HCDR1, HCDR2, HCDR3, LCDR1, LCDR2, and LCDR3 comprise the amino acid sequences of SEQ ID NO: 78, SEQ ID NO: 93, SEQ ID NO: 110, SEQ ID NO: 128, GNS, and SEQ ID NO: 1285, respectively;
   [0225] (viii) the HCDR1, HCDR2, HCDR3, LCDR1, LCDR2, and LCDR3 comprise the amino acid sequences of SEQ ID NO: 78, SEQ ID NO: 96, SEQ ID NO: 113, SEQ ID NO: 130, DAS, and SEQ ID NO: 1288, respectively;
   [0226] (xi) the HCDR1, HCDR2, HCDR3, LCDR1, LCDR2, and LCDR3 comprise the amino acid sequences of SEQ ID NO: 83, SEQ ID NO: 98, SEQ ID NO: 116, SEQ ID NO: 131, DDS, and SEQ ID NO: 1290, respectively;
   [0227] (x) the HCDR1, HCDR2, HCDR3, LCDR1, LCDR2, and LCDR3 comprise the amino acid sequences of SEQ ID NO: 84, SEQ ID NO: 99, SEQ ID NO: 117, SEQ ID NO: 132, KDT, and SEQ ID NO: 1291, respectively;
   [0228] (xi) the HCDR1, HCDR2, HCDR3, LCDR1, LCDR2, and LCDR3 comprise the amino acid sequences of SEQ ID NO: 85, SEQ ID NO: 100, SEQ ID NO: 118, SEQ ID NO: 133, KVS, and SEQ ID NO: 1292, respectively;
   [0229] (xii) the HCDR1, HCDR2, HCDR3, LCDR1, LCDR2, and LCDR3 comprise the amino acid sequences of SEQ ID NO: 85, SEQ ID NO: 100, SEQ ID NO: 118, SEQ ID NO: 134, 1283, and SEQ ID NO: 1293, respectively;
   [0230] (xiii) the HCDR1, HCDR2, HCDR3, LCDR1, LCDR2, and LCDR3 comprise the amino acid sequences of SEQ ID NO: 86, SEQ ID NO: 102, SEQ ID NO: 120, SEQ ID NO: 127, KIS, and SEQ ID NO: 1286, respectively;
   [0231] (xiv) the HCDR1, HCDR2, HCDR3, LCDR1, LCDR2, and LCDR3 comprise the amino acid sequences of SEQ ID NO: 87, SEQ ID NO: 103, SEQ ID NO: 121, SEQ ID NO: 132, KDS, and SEQ ID NO: 1295, respectively;
   [0232] (xv) the HCDR1, HCDR2, HCDR3, LCDR1, LCDR2, and LCDR3 comprise the amino acid sequences of SEQ ID NO: 78, SEQ ID NO: 104, SEQ ID NO: 122, SEQ ID NO: 135, DVS, and SEQ ID NO: 1296, respectively;
   [0233] (xvi) the HCDR1, HCDR2, HCDR3, LCDR1, LCDR2, and LCDR3 comprise the amino acid sequences of SEQ ID NO: 78, SEQ ID NO: 104, SEQ ID NO: 122, SEQ ID NO: 136, AAS, and SEQ ID NO: 1297, respectively;
   [0234] (xvii) the HCDR1, HCDR2, HCDR3, LCDR1, LCDR2, and LCDR3 comprise the amino acid sequences of SEQ ID NO: 88, SEQ ID NO: 105, SEQ ID NO: 123, SEQ ID NO: 1279, WAS, and SEQ ID NO: 1298, respectively;
   [0235] (xviii) the HCDR1, HCDR2, HCDR3, LCDR1, LCDR2, and LCDR3 comprise the amino acid sequences of SEQ ID NO: 89, SEQ ID NO: 106, SEQ ID NO: 124, SEQ ID NO: 1280, LGS, and SEQ ID NO: 1299, respectively;
   [0236] (xix) the HCDR1, HCDR2, HCDR3, LCDR1, LCDR2, and LCDR3 comprise the amino acid sequences of SEQ ID NO: 90, SEQ ID NO: 107, SEQ ID NO: 125, SEQ ID NO: 1281, WAS, and SEQ ID NO: 1300, respectively;
   [0237] (xx) the HCDR1, HCDR2, HCDR3, LCDR1, LCDR2, and LCDR3 comprise the amino acid sequences of SEQ ID NO: 91, SEQ ID NO: 108, SEQ ID NO: 126, SEQ ID NO: 1282, VGS, and SEQ ID NO: 1301, respectively;
   [0238] (xxi) the HCDR1, HCDR2, HCDR3, LCDR1, LCDR2, and LCDR3 comprise the amino acid sequences of any of the HCDR and LCDR sequences provided in Table 1; or
   [0239] (xxii) a variant, e.g., functional variant, of the antibodies of any one of (i)-(xxi), wherein any one, two, three, four, five or all of the HCDR1, HCDR2, HCDR3, LCDR1, LCDR2, and/or LCDR3 comprises one, two, or at most three substitutions (e.g., conservative substitutions); or wherein any one, two, three, four, five or all of the HCDR1, HCDR2, HCDR3, LCDR1, LCDR2, and/or LCDR3 comprises one, two, or at most three different amino acids relative to any of the sequences in (i)-(xxi).
[0240] E74. The AAV viral genome of embodiment E73, wherein the encoded antibody is according to any one of embodiments E2-E4.
[0241] E75. An adeno-associated virus (AAV) viral genome comprising a nucleotide sequence encoding an antibody that binds to human tau (e.g., SEQ ID NO: 1404), wherein the encoded antibody comprises a heavy chain CDR1, CDR2, and CDR3, and/or light chain CDR1, CDR2, and CDR3 of an antibody comprising a heavy chain variable region (VH) and light chain variable region (VL) comprising: (i) SEQ ID NOs: 1143 and 25, respectively; (ii) SEQ ID NOs: 3 and 21, respectively; (iii) SEQ ID NOs: 1140 and 22, respectively; (iv) SEQ ID NOs: 1142 and 24, respectively; (v) SEQ ID NOs: 11 and 30, respectively; (vi) SEQ ID NOs: 1 and 19, respectively; (vii) SEQ ID NOs: 2 and 20, respectively; (viii) SEQ ID NOs: 1141 and 23, respectively; (ix) SEQ ID NOs: 1144 and 26, respectively; (x) SEQ ID NOs: 1145 and 27, respectively; (xi) SEQ ID NOs: 10 and 28, respectively; (xii) SEQ ID NOs: 10 and 29, respectively; (xiii) SEQ ID NOs: 12 and 31, respectively; (xiv) SEQ ID NOs: 13 and 32, respectively; (xv) SEQ ID NOs: 14 and 33, respectively; (xvi) SEQ ID NOs: 14 and 34, respectively; (xvii) SEQ ID NOs: 15 and 35, respectively; (xviii) SEQ ID NOs: 16 and 36, respectively; (xix) SEQ ID NOs: 17 and 37, respectively; or (xx) SEQ ID NOs: 18 and 38, respectively.
[0242] E76. The AAV viral genome of embodiment E75, wherein the encoded antibody is according to embodiment E5.
[0243] E77. The AAV viral genome of any one of embodiments E73-E76, wherein the encoded antibody is according to any one of embodiments E6-E16.
[0244] E78. An adeno-associated virus (AAV) viral genome comprising a nucleotide sequence encoding an antibody that binds to human tau (e.g., SEQ ID NO: 1404), wherein the encoded antibody comprises a heavy chain variable region (VH) and/or a light chain variable region (VL) comprising: (i) SEQ ID NOs: 1143 and/or 25, respectively; (ii) SEQ ID NOs: 3 and/or 21, respectively; (iii) SEQ ID NOs: 1140 and/or 22, respectively; (iv) SEQ ID NOs: 1142 and/or 24, respectively; (v) SEQ ID NOs: 11 and/or 30, respectively; (vi) SEQ ID NOs: 1 and/or 19, respectively; (vii) SEQ ID NOs: 2 and/or 20, respectively; (viii) SEQ ID NOs: 1141 and/or 23, respectively; (ix) SEQ ID NOs: 1144 and/or 26, respectively; (x) SEQ ID NOs: 1145 and/or 27, respectively; (xi) SEQ ID NOs: 10 and/or 28, respectively; (xii) SEQ ID NOs: 10 and/or 29, respectively; (xiii) SEQ ID NOs: 12 and/or 31, respectively; (xiv) SEQ ID NOs: 13 and/or 32, respectively; (xv) SEQ ID NOs: 14 and/or 33, respectively; (xvi) SEQ ID NOs: 14 and/or 34, respectively; (xvii) SEQ ID NOs: 15 and/or 35, respectively; (xviii) SEQ ID NOs: 16 and/or 36, respectively; (xix) SEQ ID NOs: 17 and/or 37, respectively; (xx) SEQ ID NOs: 18 and/or 38, respectively; (xxi) a variant, e.g., functional variant, of the antibodies of any one of (i)-(xx), wherein the VH and/or VL has an amino acid sequence having at least 70%, 75%, 80%, 85%, 90%, 92%, 95%, 96%, 97%, 98%, or 99% sequence identity thereto; or (xxii) a variant, e.g., functional variant, of the antibodies of any one of (i)-(xx), wherein the VH and/or VL comprises at least one, two, or three modifications, but not more than 30, 20, or 10 modifications (e.g., amino acid substitutions, e.g., conservative substitutions) or wherein the VH and/or VL comprises at least one, two, or three, but not more than 30, 20, or 10 different amino acids.
[0245] E79. The AAV viral genome of any one of embodiments E73-E78, wherein the encoded antibody is according to embodiment E17.
[0246] E80. The AAV viral genome of any one of embodiments E73-E79, wherein the encoded antibody is according to any one of embodiments E19-E22.
[0247] E81. The AAV viral genome of any one of embodiments E73-E80, wherein the encoded antibody is according to embodiment E23.
[0248] E82. An adeno-associated virus (AAV) viral genome comprising a nucleotide sequence encoding an antibody that binds to human tau (e.g., SEQ ID NO: 1404), wherein the encoded antibody binds to all or a portion of amino acid residues of tau selected from: (a) 183-212, (b) 187-218, (c) 33-82, 159-182, 197-226, and 229-246; (d) 217-242, (e) 35-76 and 187-218, (f) 5-34, (g) 187-218, (h) 33-82, 159-188, and 191-230, (i) 35-62, 107-124, and 203-220, (j) 35-82, 159-188, and 197-224, or (k) 53-78, 329-348, and 381-408, wherein human tau is numbered according to SEQ ID NO: 1404.
[0249] E83. The AAV viral genome of embodiment E81 or E82, wherein the encoded antibody is according to any one of embodiments E25-E28.
[0250] E84. The AAV viral genome of any one of embodiments E73-E83, wherein the encoded antibody is according to any one of embodiments E29-E32.E85. An adeno-associated virus (AAV) viral genome comprising a nucleotide sequence encoding an antibody that binds to human tau (e.g., SEQ ID NO: 1404), wherein the encoded antibody binds to human tau phosphorylated at amino acid residue S404, or a peptide comprising or consisting of the amino acid sequence DHGAEIVYKSPVVSGDT(pS)PRHLSNVSSTG (SEQ ID NO: 1411), wherein p(S) corresponds to a phosphorylated serine residue.
[0251] E86. The AAV viral genome of embodiment E85, wherein the encoded antibody is according to any one of embodiments E34 and E35.
[0252] E87. An adeno-associated virus (AAV) viral genome comprising a nucleotide sequence encoding an antibody that binds to:
   [0253] (a) human tau phosphorylated at amino acid residue S199, but not at amino acid residues S202 and T205,
   [0254] (b) human tau phosphorylated at amino acid residue S202, but not at amino acid residues S199 and T205,
   [0255] (c) human tau phosphorylated at amino acid residue T205, but not at amino acid residues S199 and S202,
   [0256] (d) human tau phosphorylated at a combination of amino acid residues S199 and T205, but not at amino acid residue S202 (e.g., wherein binding tau phosphorylated at a combination of S199 and T205 is at least 3-times stronger (e.g., at least 4-time stronger) than background (e.g., non-specific) level of binding, e.g., binding by hIgG1 isotype control),
   [0257] (e) human tau phosphorylated at a combination of amino acid residues S202 and T205, but not at amino acid residue S199, but not human tau phosphorylated at a combination of residues S199 and S202, but not T205,
   [0258] (f) human tau phosphorylated at a combination of amino acid residues (i) S202 and T205, but not S119, and (ii) S199 and T205, but not S202, at least 2 times (e.g., at least 3 times, at least 4 times, at least 5 times, 2-6 times, 2-5 times, 2-4 times, 2-3 times, 3-5 times or 4-5 times) more strongly than background (e.g., non-specific) level of binding, e.g., binding by hIgG1 isotype control).
   [0259] (g) human tau phosphorylated at a combination of amino acid residues (i) S199 and S202, but not T205, (ii) S202 and T205, but not S199, (iii) S199 and T205, but not S202, and (iv) S199, S202, and T205 (e.g., wherein binding to phosphorylated tau is at least 1.6-times stronger (e.g., at least 1.7 times, at least 1.8 times, at least 1.9 times, at least 2 times, at least 3 times, 1.6-3 times, 1.6-2 times stronger) than background (e.g., non-specific) level of binding, e.g., binding by hIgG1 isotype control),
   [0260] (h) a peptide comprising or consisting of the amino acid sequence SGDRSGYS(pS)PGSPGTPGSRSRTPS (SEQ ID NO: 1414),
   [0261] (i) a peptide comprising or consisting of the amino acid sequence SGDRSGYSSPG(pS)PGTPGSRSRTPS (SEQ ID NO: 1415),
   [0262] (j) a peptide comprising or consisting of the amino acid sequence SGDRSGYSSPGSPG(pT)PGSRSRTPS (SEQ ID NO: 1416), or
   [0263] (k) a peptide comprising or consisting of the amino acid sequence SGDRSGYS(pS)PGSPG(pT)PGSRSRTPS (SEQ ID NO: 1420) (e.g., wherein binding to the peptide is at least 3 times stronger (e.g., at least 4 times stronger) than background (e.g., non-specific) level of binding, e.g., binding by hIgG1 isotype control),
   [0264] (l) a peptide comprising or consisting of the amino acid sequence SGDRSGYSSPG(pS)PG(pT)PGSRSRTPS (SEQ ID NO: 1419), but not a peptide comprising or consisting of the amino acid sequence SGDRSGYS(pS)PG(pS)PGTPGSRSRTPS (SEQ ID NO: 1418),
   [0265] (m) peptides comprising or consisting of the amino acid sequences SGDRSGYSSPG(pS)PG(pT)PGSRSRTPS (SEQ ID NO: 1419) and SGDRSGYS(pS)PGSPG(pT)PGSRSRTPS (SEQ ID NO: 1420), wherein binding to the latter peptide is at least 2 times (e.g., at least 3 times, at least 4 times, at least 5 times, 2-6 times, 2-5 times, 2-4 times, 2-3 times, 3-5 times or 4-5 times) more stronger than background (e.g., non-specific) level of binding, e.g., binding by hIgG1 isotype control), or
   [0266] (n) peptides comprising or consisting of the amino acid sequences SGDRSGYS(pS)PG(pS)PGTPGSRSRTPS (SEQ ID NO: 1418), SGDRSGYSSPG(pS)PG(pT)PGSRSRTPS (SEQ ID NO: 1419), SGDRSGYS(pS)PGSPG(pT)PGSRSRTPS (SEQ ID NO: 1420), and SGDRSGYS(pS)PG(pS)PG(pT)PGSRSRTPS (SEQ ID NO: 1417) (e.g., wherein binding to the peptides is at least 1.6 times stronger (e.g., at least 1.7 times, at least 1.8 times, at least 1.9 times, at least 2 times, at least 3 times, 1.6-4 times, 1.6-3 times stronger) than background (e.g., non-specific) level of binding, e.g., binding by hIgG1 isotype control),
      [0267] wherein p(S) and p(T) correspond to a phosphorylated serine and phosphorylated threonine,
      [0268] respectively,
      [0269] optionally wherein binding is assessed, e.g., using one point ELISA as described in Example 7, and optionally wherein human tau has the sequence set forth in SEQ ID NO: 1404.
[0270] E88. The AAV viral genome of embodiment E87, wherein the encoded antibody is according to embodiment E37 or E38.
[0271] E89. An adeno-associated virus (AAV) viral genome comprising a nucleotide sequence encoding an antibody that binds to:
   [0272] (a) human tau phosphorylated at amino acid residue S199, but not at amino acid residues S202 and T205, and wherein the antibody comprises a heavy chain variable region (VH) comprising CDR1, CDR2, and CDR3 sequences comprising SEQ ID NOs: 82, 97, and 115, respectively, and a light chain variable region (VL) comprising CDR1, CDR2, and CDR3 sequences comprising SEQ ID NO: 127, KIS, and SEQ ID NO: 1289, respectively;
   [0273] (b) human tau phosphorylated at amino acid residue S202, but not at amino acid residues S199 and T205, and wherein the antibody comprises (i) a heavy chain variable region (VH) comprising CDR1, CDR2, and CDR3 sequences comprising SEQ ID NOs: 79, 94, and 111, respectively, and a light chain variable region (VL) comprising CDR1, CDR2, and CDR3 sequences comprising SEQ ID NO: 127, KIS, and SEQ ID NO: 1286, respectively; (ii) a heavy chain variable region (VH) comprising CDR1, CDR2, and CDR3 sequences comprising SEQ ID NOs: 81, 94, and 114, respectively, and a light chain variable region (VL) comprising CDR1, CDR2, and CDR3 sequences comprising SEQ ID NO: 127, KIS, and SEQ ID NO: 1286, respectively; or (iii) a heavy chain variable region (VH) comprising CDR1, CDR2, and CDR3 sequences comprising SEQ ID NOs: 86, 102, and 120, respectively, and a light chain variable region (VL) comprising CDR1, CDR2, and CDR3 sequences comprising SEQ ID NO: 127, KIS, and SEQ ID NO: 1286, respectively;
   [0274] (c) human tau phosphorylated at amino acid residue T205, but not at amino acid residues S199 and S202, and wherein the antibody comprises (i) a heavy chain variable region (VH) comprising CDR1, CDR2, and CDR3 sequences comprising SEQ ID NOs: 79, 94, and 111, respectively, and a light chain variable region (VL) comprising CDR1, CDR2, and CDR3 sequences comprising SEQ ID NO: 127, KIS, and SEQ ID NO: 1286, respectively; (ii) a heavy chain variable region (VH) comprising CDR1, CDR2, and CDR3 sequences comprising SEQ ID NOs: 81, 94, and 114, respectively, and a light chain variable region (VL) comprising CDR1, CDR2, and CDR3 sequences comprising SEQ ID NO: 127, KIS, and SEQ ID NO: 1286, respectively; or (iii) a heavy chain variable region (VH) comprising CDR1, CDR2, and CDR3 sequences comprising SEQ ID NOs: 86, 102, and 120, respectively, and a light chain variable region (VL) comprising CDR1, CDR2, and CDR3 sequences comprising SEQ ID NO: 127, KIS, and SEQ ID NO: 1286, respectively;
   [0275] (d) human tau phosphorylated at a combination of amino acid residues S199 and T205, but not at amino acid residue S202 (e.g., wherein binding tau phosphorylated at a combination of S199 and T205 is at least 3-times stronger (e.g., at least 4-time stronger) than background (e.g., non-specific) level of binding, e.g., binding by hIgG1 isotype control), and wherein the antibody comprises (i) a heavy chain variable region (VH) comprising CDR1, CDR2, and CDR3 sequences comprising SEQ ID NOs: 79, 94, and 111, respectively, and a light chain variable region (VL) comprising CDR1, CDR2, and CDR3 sequences comprising SEQ ID NO: 127, KIS, and SEQ ID NO: 1286, respectively; (ii) a heavy chain variable region (VH) comprising CDR1, CDR2, and CDR3 sequences comprising SEQ ID NOs: 81, 94, and 114, respectively, and a light chain variable region (VL) comprising CDR1, CDR2, and CDR3 sequences comprising SEQ ID NO: 127, KIS, and SEQ ID NO: 1286, respectively; (iii) a heavy chain variable region (VH) comprising CDR1, CDR2, and CDR3 sequences comprising SEQ ID NOs: 82, 97, and 115, respectively, and a light chain variable region (VL) comprising CDR1, CDR2, and CDR3 sequences comprising SEQ ID NO: 127, KIS, and SEQ ID NO: 1289, respectively; or (iv) a heavy chain variable region (VH) comprising CDR1, CDR2, and CDR3 sequences comprising SEQ ID NOs: 86, 102, and 120, respectively, and a light chain variable region (VL) comprising CDR1, CDR2, and CDR3 sequences comprising SEQ ID NO: 127, KIS, and SEQ ID NO: 1286, respectively;
   [0276] (e) human tau phosphorylated at a combination of amino acid residues S202 and T205, but not at amino acid residue S199, but not human tau phosphorylated at a combination of residues S199 and S202, but not T205, and wherein the antibody comprises a heavy chain variable region (VH) comprising CDR1, CDR2, and CDR3 sequences comprising SEQ ID NOs: 77, 92, and 109, respectively, and a light chain variable region (VL) comprising CDR1, CDR2, and CDR3 sequences comprising SEQ ID NO: 127, KIS, and SEQ ID NO: 1284, respectively;
   [0277] (f) human tau phosphorylated at a combination of amino acid residues (i) S202 and T205, but not S119, and (ii) S199 and T205, but not S202, at least 2 times (e.g., at least 3 times, at least 4 times, at least 5 times, 2-6 times, 2-5 times, 2-4 times, 2-3 times, 3-5 times or 4-5 times) more strongly than background (non-specific) level of binding, e.g., binding by hIgG1 isotype control), and wherein the antibody comprises (i) a heavy chain variable region (VH) comprising CDR1, CDR2, and CDR3 sequences comprising SEQ ID NOs: 79, 94, and 111, respectively, and a light chain variable region (VL) comprising CDR1, CDR2, and CDR3 sequences comprising SEQ ID NO: 127, KIS, and SEQ ID NO: 1286, respectively; (ii) a heavy chain variable region (VH) comprising CDR1, CDR2, and CDR3 sequences comprising SEQ ID NOs: 81, 94, and 114, respectively, and a light chain variable region (VL) comprising CDR1, CDR2, and CDR3 sequences comprising SEQ ID NO: 127, KIS, and SEQ ID NO: 1286, respectively; (iii) a heavy chain variable region (VH) comprising CDR1, CDR2, and CDR3 sequences comprising SEQ ID NOs: 82, 97, and 115, respectively, and a light chain variable region (VL) comprising CDR1, CDR2, and CDR3 sequences comprising SEQ ID NO: 127, KIS, and SEQ ID NO: 1289, respectively; or (iv) a heavy chain variable region (VH) comprising CDR1, CDR2, and CDR3 sequences comprising SEQ ID NOs: 86, 102, and 120, respectively, and a light chain variable region (VL) comprising CDR1, CDR2, and CDR3 sequences comprising SEQ ID NO: 127, KIS, and SEQ ID NO: 1286, respectively;
[0278] (g) human tau phosphorylated at a combination of amino acid residues (i) S199 and S202, but not T205, (ii) S202 and T205, but not S199, (iii) S199 and T205, but not S202, and (iv) S199, S202, and T205 (e.g., wherein binding to phosphorylated tau is at least 1.6-times stronger (e.g., at least 1.7 times, at least 1.8 times, at least 1.9 times, at least 2 times, at least 3 times, 1.6-3 times, 1.6-2 times stronger) than background (non-specific) level of binding, e.g., binding by hIgG1 isotype control), and wherein the antibody comprises (i) a heavy chain variable region (VH) comprising CDR1, CDR2, and CDR3 sequences comprising SEQ ID NOs: 79, 94, and 111, respectively, and a light chain variable region (VL) comprising CDR1, CDR2, and CDR3 sequences comprising SEQ ID NO: 127, KIS, and SEQ ID NO: 1286, respectively; (ii) a heavy chain variable region (VH) comprising CDR1, CDR2, and CDR3 sequences comprising SEQ ID NOs: 81, 94, and 114, respectively, and a light chain variable region (VL) comprising CDR1, CDR2, and CDR3 sequences comprising SEQ ID NO: 127, KIS, and SEQ ID NO: 1286, respectively; (iii) a heavy chain variable region (VH) comprising CDR1, CDR2, and CDR3 sequences comprising SEQ ID NOs: 82, 97, and 115, respectively, and a light chain variable region (VL) comprising CDR1, CDR2, and CDR3 sequences comprising SEQ ID NO: 127, KIS, and SEQ ID NO: 1289, respectively; or (iv) a heavy chain variable region (VH) comprising CDR1, CDR2, and CDR3 sequences comprising SEQ ID NOs: 86, 102, and 120, respectively, and a light chain variable region (VL) comprising CDR1, CDR2, and CDR3 sequences comprising SEQ ID NO: 127, KIS, and SEQ ID NO: 1286, respectively;
   [0279] (h) a peptide comprising or consisting of the amino acid sequence SGDRSGYS(pS)PGSPGTPGSRSRTPS (SEQ ID NO: 1414), and wherein the antibody comprises a heavy chain variable region (VH) comprising CDR1, CDR2, and CDR3 sequences comprising SEQ ID NOs: 82, 97, and 115, respectively, and a light chain variable region (VL) comprising CDR1, CDR2, and CDR3 sequences comprising SEQ ID NO: 127, KIS, and SEQ ID NO: 1289, respectively
   [0280] (i) a peptide comprising or consisting of the amino acid sequence SGDRSGYSSPG(pS)PGTPGSRSRTPS (SEQ ID NO: 1415), and wherein the antibody comprises (i) a heavy chain variable region (VH) comprising CDR1, CDR2, and CDR3 sequences comprising SEQ ID NOs: 79, 94, and 111, respectively, and a light chain variable region (VL) comprising CDR1, CDR2, and CDR3 sequences comprising SEQ ID NO: 127, KIS, and SEQ ID NO: 1286, respectively; (ii) a heavy chain variable region (VH) comprising CDR1, CDR2, and CDR3 sequences comprising SEQ ID NOs: 81, 94, and 114, respectively, and a light chain variable region (VL) comprising CDR1, CDR2, and CDR3 sequences comprising SEQ ID NO: 127, KIS, and SEQ ID NO: 1286, respectively; or (iii) a heavy chain variable region (VH) comprising CDR1, CDR2, and CDR3 sequences comprising SEQ ID NOs: 86, 102, and 120, respectively, and a light chain variable region (VL) comprising CDR1, CDR2, and CDR3 sequences comprising SEQ ID NO: 127, KIS, and SEQ ID NO: 1286, respectively;
   [0281] (j) a peptide comprising or consisting of the amino acid sequence SGDRSGYSSPGSPG(pT)PGSRSRTPS (SEQ ID NO: 1416), and wherein the antibody comprises (i) a heavy chain variable region (VH) comprising CDR1, CDR2, and CDR3 sequences comprising SEQ ID NOs: 79, 94, and 111, respectively, and a light chain variable region (VL) comprising CDR1, CDR2, and CDR3 sequences comprising SEQ ID NO: 127, KIS, and SEQ ID NO: 1286, respectively; (ii) a heavy chain variable region (VH) comprising CDR1, CDR2, and CDR3 sequences comprising SEQ ID NOs: 81, 94, and 114, respectively, and a light chain variable region (VL) comprising CDR1, CDR2, and CDR3 sequences comprising SEQ ID NO: 127, KIS, and SEQ ID NO: 1286, respectively; or (iii) a heavy chain variable region (VH) comprising CDR1, CDR2, and CDR3 sequences comprising SEQ ID NOs: 86, 102, and 120, respectively, and a light chain variable region (VL) comprising CDR1, CDR2, and CDR3 sequences comprising SEQ ID NO: 127, KIS, and SEQ ID NO: 1286, respectively;
   [0282] (k) a peptide comprising or consisting of the amino acid sequence SGDRSGYS(pS)PGSPG(pT)PGSRSRTPS (SEQ ID NO: 1420) (e.g., wherein binding to the peptide is at least 3 times stronger (e.g., at least 4 times stronger) than background (non-specific) level of binding, e.g., binding by hIgG1 isotype control), and wherein the antibody comprises (i) a heavy chain variable region (VH) comprising CDR1, CDR2, and CDR3 sequences comprising SEQ ID NOs: 79, 94, and 111, respectively, and a light chain variable region (VL) comprising CDR1, CDR2, and CDR3 sequences comprising SEQ ID NO: 127, KIS, and SEQ ID NO: 1286, respectively; (ii) a heavy chain variable region (VH) comprising CDR1, CDR2, and CDR3 sequences comprising SEQ ID NOs: 81, 94, and 114, respectively, and a light chain variable region (VL) comprising CDR1, CDR2, and CDR3 sequences comprising SEQ ID NO: 127, KIS, and SEQ ID NO: 1286, respectively; (iii) a heavy chain variable region (VH) comprising CDR1, CDR2, and CDR3 sequences comprising SEQ ID NOs: 82, 97, and 115, respectively, and a light chain variable region (VL) comprising CDR1, CDR2, and CDR3 sequences comprising SEQ ID NO: 127, KIS, and SEQ ID NO: 1289, respectively; or (iv) a heavy chain variable region (VH) comprising CDR1, CDR2, and CDR3 sequences comprising SEQ ID NOs: 86, 102, and 120, respectively, and a light chain variable region (VL) comprising CDR1, CDR2, and CDR3 sequences comprising SEQ ID NO: 127, KIS, and SEQ ID NO: 1286, respectively;
   [0283] (l) a peptide comprising or consisting of the amino acid sequence SGDRSGYSSPG(pS)PG(pT)PGSRSRTPS (SEQ ID NO: 1419), but not a peptide comprising or consisting of the amino acid sequence SGDRSGYS(pS)PG(pS)PGTPGSRSRTPS (SEQ ID NO: 1418), and wherein the antibody comprises a heavy chain variable region (VH) comprising CDR1, CDR2, and CDR3 sequences comprising SEQ ID NOs: 77, 92, and 109, respectively, and a light chain variable region (VL) comprising CDR1, CDR2, and CDR3 sequences comprising SEQ ID NO: 127, KIS, and SEQ ID NO: 1284, respectively
   [0284] (m) peptides comprising or consisting of the amino acid sequences SGDRSGYSSPG(pS)PG(pT)PGSRSRTPS (SEQ ID NO: 1419) and SGDRSGYS(pS)PGSPG(pT)PGSRSRTPS (SEQ ID NO: 1420), wherein binding to the latter peptide is at least 2 times (e.g., at least 3 times, at least 4 times, at least 5 times, 2-6 times, 2-5 times, 2-4 times, 2-3 times, 3-5 times or 4-5 times) more stronger than background (non-specific) level of binding, e.g., binding by hIgG1 isotype control), and wherein the antibody comprises (i) a heavy chain variable region (VH) comprising CDR1, CDR2, and CDR3 sequences comprising SEQ ID NOs: 79, 94, and 111, respectively, and a light chain variable region (VL) comprising CDR1, CDR2, and CDR3 sequences comprising SEQ ID NO: 127, KIS, and SEQ ID NO: 1286, respectively; (ii) a heavy chain variable region (VH) comprising CDR1, CDR2, and CDR3 sequences comprising SEQ ID NOs: 81, 94, and 114, respectively, and a light chain variable region (VL) comprising CDR1, CDR2, and CDR3 sequences comprising SEQ ID NO: 127, KIS, and SEQ ID NO: 1286, respectively; (iii) a heavy chain variable region (VH) comprising CDR1, CDR2, and CDR3 sequences comprising SEQ ID NOs: 82, 97, and 115, respectively, and a light chain variable region (VL) comprising CDR1, CDR2, and CDR3 sequences comprising SEQ ID NO: 127, KIS, and SEQ ID NO: 1289, respectively; or (iv) a heavy chain variable region (VH) comprising CDR1, CDR2, and CDR3 sequences comprising SEQ ID NOs: 86, 102, and 120, respectively, and a light chain variable region (VL) comprising CDR1, CDR2, and CDR3 sequences comprising SEQ ID NO: 127, KIS, and SEQ ID NO: 1286, respectively; or
   [0285] (n) peptides comprising or consisting of the amino acid sequences SGDRSGYS(pS)PG(pS)PGTPGSRSRTPS (SEQ ID NO: 1418), SGDRSGYSSPG(pS)PG(pT)PGSRSRTPS (SEQ ID NO: 1419), SGDRSGYS(pS)PGSPG(pT)PGSRSRTPS (SEQ ID NO: 1420), and SGDRSGYS(pS)PG(pS)PG(pT)PGSRSRTPS (SEQ ID NO: 1417) (e.g., wherein binding to the peptides is at least 1.6 times stronger (e.g., at least 1.7 times, at least 1.8 times, at least 1.9 times, at least 2 times, at least 3 times, 1.6-4 times, 1.6-3 times stronger) than background (non-specific) level of binding, e.g., binding by hIgG1 isotype control), and wherein the antibody comprises (i) a heavy chain variable region (VH) comprising CDR1, CDR2, and CDR3 sequences comprising SEQ ID NOs: 79, 94, and 111, respectively, and a light chain variable region (VL) comprising CDR1, CDR2, and CDR3 sequences comprising SEQ ID NO: 127, KIS, and SEQ ID NO: 1286, respectively; (ii) a heavy chain variable region (VH) comprising CDR1, CDR2, and CDR3 sequences comprising SEQ ID NOs: 81, 94, and 114, respectively, and a light chain variable region (VL) comprising CDR1, CDR2, and CDR3 sequences comprising SEQ ID NO: 127, KIS, and SEQ ID NO: 1286, respectively; (iii) a heavy chain variable region (VH) comprising CDR1, CDR2, and CDR3 sequences comprising SEQ ID NOs: 82, 97, and 115, respectively, and a light chain variable region (VL) comprising CDR1, CDR2, and CDR3 sequences comprising SEQ ID NO: 127, KIS, and SEQ ID NO: 1289, respectively; or (iv) a heavy chain variable region (VH) comprising CDR1, CDR2, and CDR3 sequences comprising SEQ ID NOs: 86, 102, and 120, respectively, and a light chain variable region (VL) comprising CDR1, CDR2, and CDR3 sequences comprising SEQ ID NO: 127, KIS, and SEQ ID NO: 1286, respectively;
      [0286] wherein p(S) and p(T) correspond to a phosphorylated serine and phosphorylated threonine, respectively,
      [0287] optionally wherein binding is assessed, e.g., using one point ELISA as described in Example 7, and optionally wherein human tau has the sequence set forth in SEQ ID NO: 1404.
[0288] E90. An adeno-associated virus (AAV) viral genome comprising a nucleotide sequence encoding an antibody that binds to:
   [0289] (a) tau phosphorylated at T217, but not at T212 or T214, or
   [0290] (b) peptides comprising or consisting of the sequences GTPGSRSRTPSLP(pT)PPTRE (SEQ ID NO: 1423) and GTPGSRSRTP(pS)LP(pT)PPTRE (SEQ ID NO: 1426), but not peptides comprising or consisting of the sequences GTPGSRSR(pT)PSLPTPPTRE (SEQ ID NO: 1421), GTPGSRSRTP(pS)LPTPPTRE (SEQ ID NO: 1422), and GTPGSRSR(pT)P(pS)LPTPPTRE (SEQ ID NO: 1424),
      [0291] wherein p(S) and p(T) correspond to a phosphorylated serine and phosphorylated threonine, respectively,
      [0292] optionally wherein binding of the antibody to tau or the peptide is at least 1.5 times stronger (e.g., at least 1.6 times, at least 1.7 times, at least 1.8 times, at least 1.9 times, at least 2 times, at least 3 times, at least 4 times, at least 5 times, at least 6 times, 1.5-4 times, 1.5-3, 4-6 times stronger) than background (non-specific) level of binding, e.g., binding by hIgG1 isotype control),
      [0293] optionally wherein binding of the antibody to tau or the peptide is assessed, e.g., using one point ELISA as described, e.g., in Example 8, and optionally wherein human tau has the sequence set forth in SEQ ID NO: 1404.
[0294] E91. The AAV viral genome of embodiment E90, wherein the encoded antibody is according to embodiment E41 or E42.
[0295] E92. The AAV viral genome of any one of embodiments E73-E91, wherein the encoded antibody is according to any one of embodiments E43-E65.
[0296] E93. An adeno-associated virus (AAV) viral genome comprising a nucleotide sequence encoding an antibody that competes for binding to human tau with the encoded antibody of any one of embodiments E1-E68.
[0297] E94. An adeno-associated virus (AAV) viral genome comprising a nucleotide sequence encoding an antibody that binds to the same epitope, substantially the same epitope as, an epitope that overlaps with, or an epitope that substantially overlaps with, the epitope of the encoded antibody of any one of embodiments E1-E68.
[0298] E95. The AAV viral genome of any one of embodiments E73-E94, wherein the encoded antibody is according to embodiment E65.
[0299] E96. The AAV viral genome of any one of embodiments E73-E95, which comprises a promoter operably linked to the nucleotide sequence encoding the antibody.
[0300] E97. The AAV viral genome of embodiment E96, wherein the promoter is chosen from human elongation factor 1α-subunit (EF1α), cytomegalovirus (CMV) immediate-early enhancer and/or promoter, chicken β-actin (CBA) and its derivative CAG, β glucuronidase (GUSB), or ubiquitin C (UBC), neuron-specific enolase (NSE), platelet-derived growth factor (PDGF), platelet-derived growth factor B-chain (PDGF-β), intercellular adhesion molecule 2 (ICAM-2), synapsin (Syn), methyl-CpG binding protein 2 (MeCP2), Ca2+/calmodulin-dependent protein kinase II (CaMKII), metabotropic glutamate receptor 2 (mGluR2), neurofilament light (NFL) or heavy (NFH), β-globin minigene nβ2, preproenkephalin (PPE), enkephalin (Enk) and excitatory amino acid transporter 2 (EAAT2), glial fibrillary acidic protein (GFAP), myelin basic protein (MBP), a cardiovascular promoter (e.g., αMHC, cTnT, and CMV-MLC2k), a liver promoter (e.g., hAAT, TBG), a skeletal muscle promoter (e.g., desmin, MCK, C512) or a fragment, e.g., a truncation, or a functional variant thereof.
[0301] E98. The AAV viral genome of embodiment E97, wherein the promoter is an EF-1a promoter variant, e.g., a truncated EF-1a promoter.
[0302] E99. The AAV viral genome of any one of embodiments E96-E98, wherein the promoter comprises the nucleotide sequence of any one of SEQ ID NOs: 2080-2089, 2238, or 2239, a nucleotide sequence comprising at least one, two, or three but no more than four modifications, e.g., substitutions, insertions, or deletions, relative to the nucleotide sequence of SEQ ID NOs: 2080-2089, 2238, or 2239, or a nucleotide sequence with at least 80% (e.g., 85%, 90%, 95%, 96%, 97%, 98%, or 99%) sequence identity to any one of SEQ ID NOs: 2080-2089, 2238, or 2239.
[0303] E100. The AAV viral genome of any one of embodiments E96-E99, wherein the viral genome further comprises a polyA signal sequence.

[0304] E101. The AAV viral genome of embodiment E100, wherein the polyA signal sequence comprises the nucleotide sequence of any one of SEQ ID NOs: 2122-2124, a nucleotide sequence comprising at least one, two, or three but no more than four modifications, e.g., substitutions, insertions, or deletions, relative to the nucleotide sequence of SEQ ID NOs: 2122-2124, or a nucleotide sequence with at least 80% (e.g., 85%, 90%, 95%, 96%, 97%, 98%, or 99%) sequence identity to any one of SEQ ID NOs: 2122-2124.
[0305] E102. The AAV viral genome of any one of embodiments E96-E101, wherein the viral genome further comprises an inverted terminal repeat (ITR) sequence.
[0306] E103. The AAV viral genome of embodiment E102, wherein the ITR sequence comprises the nucleotide sequence of any one of SEQ ID NOs: 2076-2079, a nucleotide sequence comprising at least one, two, or three but no more than four modifications, e.g., substitutions, insertions, or deletions, relative to the nucleotide sequence of SEQ ID NOs: 2076-2079, or a nucleotide sequence with at least 80% (e.g., 85%, 90%, 95%, 96%, 97%, 98%, or 99%) sequence identity to any one of SEQ ID NOs: 2076-2079.
[0307] E104. The AAV viral genome of any one of embodiments E96-E103, wherein the viral genome comprises an ITR sequence positioned 5′ relative to the encoded antibody.
[0308] E105. The AAV viral genome of any one of embodiments E96-E104, wherein the viral genome comprises an ITR sequence positioned 3′ relative to the encoded antibody.
[0309] E106. The AAV viral genome of any one of embodiments E96-E105, wherein the viral genome comprises an ITR sequence positioned 5′ relative to the encoded payload and an ITR sequence positioned 3′ relative to the encoded antibody.
[0310] E107. The AAV viral genome of any one of embodiments E96-E106, wherein the viral genome further comprises an enhancer, a Kozak sequence, an intron region, and/or an exon region.
[0311] E108. The AAV viral genome of any one of embodiments E96-E107, wherein the viral genome further comprises a nucleotide sequence encoding a miR binding site, e.g., a miR binding site that modulates, e.g., reduces, expression of the antibody encoded by the viral genome in a cell or tissue where the corresponding miRNA is expressed.
[0312] E109. The AAV viral genome of embodiment E108, wherein the encoded miRNA binding site is complementary, e.g., fully complementary or partially complementary, to a miRNA expressed in a cell or tissue of the DRG, liver, heart, hematopoietic, or a combination thereof.
[0313] E110. The AAV viral genome of embodiment E108 or E109, wherein the encoded miR binding site modulates, e.g., reduces, expression of the encoded antibody in a cell or tissue of the DRG, liver, heart, hematopoietic lineage, or a combination thereof.
[0314] E111. The AAV viral genome of any one of embodiments E108-E110, wherein the viral genome comprises at least 1-5 copies of the encoded miR binding site, e.g., at least 1, 2, 3, 4, or 5 copies. E112. The AAV viral genome of any one of embodiments E108-E111, wherein the viral genome comprises at least 3 copies of an encoded miR binding sites, optionally wherein all three copies comprise the same miR binding site, or at least one, two, three, or all of the copies comprise a different miR binding site.
[0315] E113. The AAV viral genome of embodiment E112, wherein the at least 3 copies of the encoded miR binding sites are continuous (e.g., not separated by a spacer), or are separated by a spacer, optionally wherein the spacer comprises the nucleotide sequence of GATAGTTA, or a nucleotide sequence having at least one, two, or three modifications, e.g., substitutions, but no more than four modifications, e.g., substitutions, relative to GATAGTTA.
[0316] E114. The AAV viral genome of any one of embodiments E108-E113, wherein the viral genome comprises at least 4 copies of an encoded miR binding site, optionally wherein all four copies comprise the same miR binding site, or at least one, two, three, or all of the copies comprise a different miR binding site.
[0317] E115. The AAV viral genome of embodiment E114, wherein the at least 4 copies of the encoded miR binding sites are continuous (e.g., not separated by a spacer), or are separated by a spacer, optionally wherein the spacer comprises the nucleotide sequence of GATAGTTA, or a nucleotide sequence having at least one, two, or three modifications, e.g., substitutions (e.g., conservative substitutions), but no more than four modifications, e.g., substitutions (e.g., conservative substitutions), relative to GATAGTTA.
[0318] E116. The AAV viral genome of any one of embodiments E108-E115, wherein the encoded miR binding site comprises a miR122 binding site, a miR183 binding site, a miR-1 binding site, a miR-142-3p binding site, a miR182 binding site, a miR96 binding site, or a combination thereof, optionally wherein:
   [0319] (i) the encoded miR122 binding site comprises the nucleotide sequence of SEQ ID NO: 4673 or 4674, or a nucleotide sequence substantially identical (e.g., having at least 70%, 75%, 80%, 85%, 90%, 92%, 95%, 97%, 98%, or 99% sequence identity) thereto; or a nucleotide sequence having at least one, two, three, four, five, six, or seven modifications, e.g., substitutions (e.g., conservative substitutions), but no more than ten modifications, e.g., substitutions (e.g., conservative substitutions), relative to SEQ ID NO: 4673 or 4674;
   [0320] (ii) the encoded miR183 binding site comprises the nucleotide sequence of SEQ ID NO: 4676, or a nucleotide sequence substantially identical (e.g., having at least 70%, 75%, 80%, 85%, 90%, 92%, 95%, 97%, 98%, or 99% sequence identity) thereto; or a nucleotide sequence having at least one, two, three, four, five, six, or seven modifications, e.g., substitutions (e.g., conservative substitutions), but no more than ten modifications, e.g., substitutions (e.g., conservative substitutions), relative to SEQ ID NO: 4676;
   [0321] (iii) the encoded miR-1 binding site comprises the nucleotide sequence of SEQ ID NO: 4679, or a nucleotide sequence substantially identical (e.g., having at least 70%, 75%, 80%, 85%, 90%, 92%, 95%, 97%, 98%, or 99% sequence identity) thereto; or a nucleotide sequence having at least one, two, three, four, five, six, or seven modifications, e.g., substitutions (e.g., conservative substitutions), but no more than ten modifications, e.g., substitutions (e.g., conservative substitutions), relative to SEQ ID NO: 4679;
   [0322] (iv) the encoded miR-142-3p binding site comprises the nucleotide sequence of SEQ ID NO: 4675, or a nucleotide sequence substantially identical (e.g., having at least 70%, 75%, 80%, 85%, 90%, 92%, 95%, 97%, 98%, or 99% sequence identity) thereto; or a nucleotide sequence having at least one, two, three, four, five, six, or seven modifications, e.g., substitutions (e.g., conservative substitutions), but no more than ten modifications, e.g., substitutions (e.g., conservative substitutions), relative to SEQ ID NO: 4675;
   [0323] (v) the encoded miR-182 binding site comprises the nucleotide sequence of SEQ ID NO: 4677, or a nucleotide sequence substantially identical (e.g., having at least 70%, 75%, 80%, 85%, 90%, 92%, 95%, 97%, 98%, or 99% sequence identity) thereto; or a nucleotide sequence having at least one, two, three, four, five, six, or seven modifications, e.g., substitutions (e.g., conservative substitutions), but no more than ten modifications, e.g., substitutions (e.g., conservative substitutions), relative to SEQ ID NO: 4677; and/or
   [0324] (vi) the encoded miR96 binding site comprises the nucleotide sequence of SEQ ID NO: 4678, or a nucleotide sequence substantially identical (e.g., having at least 70%, 75%, 80%, 85%, 90%, 92%, 95%, 97%, 98%, or 99% sequence identity) thereto; or a nucleotide sequence having at least one, two, three, four, five, six, or seven modifications, e.g., substitutions (e.g., conservative substitutions), but no more than ten modifications, e.g., substitutions (e.g., conservative substitutions), relative to SEQ ID NO: 4678.
[0325] E117. The AAV viral genome of any one of embodiments E108-E116, wherein the viral genome comprises an encoded miR122 binding site.
[0326] E118. The AAV viral genome of any one of embodiments E108-E117, wherein the viral genome comprises at least 1-5 copies, e.g., 1, 2, or 3 copies of a miR122 binding site, optionally wherein each copy is continuous (e.g., not separated by a spacer), or each copy is separated by a spacer, optionally wherein the spacer comprises the nucleotide sequence of GATAGTTA, or a nucleotide sequence having at least one, two, or three modifications, e.g., substitutions (e.g., conservative substitutions), but no more than four modifications, e.g., substitutions (e.g., conservative substitutions), relative to GATAGTTA.
[0327] E119. The AAV viral genome of any one of embodiments E116-E118, wherein the encoded miR122 binding site comprises the nucleotide sequence of SEQ ID NO: 4673 or 4674, or a nucleotide sequence substantially identical (e.g., having at least 70%, 75%, 80%, 85%, 90%, 92%, 95%, 97%, 98%, or 99% sequence identity) thereto; or a nucleotide sequence having at least one, two, three, four, five, six, or seven modifications, e.g., substitutions (e.g., conservative substitutions), but no more than ten modifications, e.g., substitutions (e.g., conservative substitutions), relative to SEQ ID NO: 4673 or 4674.
[0328] E120. The AAV viral genome of any one of embodiments E108-E119, wherein the viral genome comprises:
   [0329] (A) (i) a first encoded miR122 binding site comprising the nucleotide sequence of SEQ ID NO: 4673, or a nucleotide sequence substantially identical (e.g., having at least 70%, 75%, 80%, 85%, 90%, 92%, 95%, 97%, 98%, or 99% sequence identity) thereto; or a nucleotide sequence having at least one, two, three, four, five, six, or seven modifications, e.g., substitutions (e.g., conservative substitutions), but no more than ten modifications, e.g., substitutions (e.g., conservative substitutions), relative to SEQ ID NO: 4673;
   [0330] (ii) a first spacer comprising the nucleotide sequence of GATAGTTA, or a nucleotide sequence having at least one, two, or three modifications, e.g., substitutions (e.g., conservative substitutions), but no more than four modifications, e.g., substitutions (e.g., conservative substitutions), relative to GATAGTTA; and
   [0331] (iii) a second encoded miR122 binding site comprising the nucleotide sequence of SEQ ID NO: 4673, or a nucleotide sequence substantially identical (e.g., having at least 70%, 75%, 80%, 85%, 90%, 92%, 95%, 97%, 98%, or 99% sequence identity) thereto; or a nucleotide sequence having at least one, two, three, four, five, six, or seven modifications, e.g., substitutions (e.g., conservative substitutions), but no more than ten modifications, e.g., substitutions (e.g., conservative substitutions), relative to SEQ ID NO: 4673; or
[0332] (B) (i) a first encoded miR122 binding site comprising the nucleotide sequence of SEQ ID NO: 4673, or a nucleotide sequence substantially identical (e.g., having at least 70%, 75%, 80%, 85%, 90%, 92%, 95%, 97%, 98%, or 99% sequence identity) thereto; or a nucleotide sequence having at least one, two, three, four, five, six, or seven modifications, e.g., substitutions (e.g., conservative substitutions), but no more than ten modifications, e.g., substitutions (e.g., conservative substitutions), relative to SEQ ID NO: 4673;
   [0333] (ii) a first spacer comprising the nucleotide sequence of GATAGTTA, or a nucleotide sequence having at least one, two, or three modifications, e.g., substitutions (e.g., conservative substitutions), but no more than four modifications, e.g., substitutions (e.g., conservative substitutions), relative to GATAGTTA;
   [0334] (iii) a second encoded miR122 binding site comprising the nucleotide sequence of SEQ ID NO: 4673, or a nucleotide sequence substantially identical (e.g., having at least 70%, 75%, 80%, 85%, 90%, 92%, 95%, 97%, 98%, or 99% sequence identity) thereto; or a nucleotide sequence having at least one, two, three, four, five, six, or seven modifications, e.g., substitutions (e.g., conservative substitutions), but no more than ten modifications, e.g., substitutions (e.g., conservative substitutions), relative to SEQ ID NO: 4673;
   [0335] (iv) a second spacer comprising the nucleotide sequence of GATAGTTA, or a nucleotide sequence having at least one, two, or three modifications, e.g., substitutions (e.g., conservative substitutions), but no more than four modifications, e.g., substitutions (e.g., conservative substitutions), relative to GATAGTTA; and
   [0336] (v) a third encoded miR122 binding site comprising the nucleotide sequence of SEQ ID NO: 4673, or a nucleotide sequence substantially identical (e.g., having at least 70%, 75%, 80%, 85%, 90%, 92%, 95%, 97%, 98%, or 99% sequence identity) thereto; or a nucleotide sequence having at least one, two, three, four, five, six, or seven modifications, e.g., substitutions (e.g., conservative substitutions), but no more than ten modifications, e.g., substitutions (e.g., conservative substitutions), relative to SEQ ID NO: 4673.
[0337] E121. The AAV viral genome of any one of embodiments E108-E120, wherein the viral genome comprises an encoded miR183 binding site.
[0338] E122. The AAV viral genome of any one of embodiments E108-E121, wherein the viral genome comprises at least 1-5 copies, e.g., 1, 2, or 3 copies of a miR183 binding site, optionally wherein each copy is continuous (e.g., not separated by a spacer), or each copy is separated by a spacer, optionally wherein the spacer comprises the nucleotide sequence of GATAGTTA, or a nucleotide sequence having at least one, two, or three modifications, e.g., substitutions (e.g., conservative substitutions), but no more than four modifications, e.g., substitutions (e.g., conservative substitutions), relative to GATAGTTA.
[0339] E123. The AAV viral genome of embodiment E122, wherein the encoded miR183 binding site comprises the nucleotide sequence of SEQ ID NO: 4676, or a nucleotide sequence substantially identical (e.g., having at least 70%, 75%, 80%, 85%, 90%, 92%, 95%, 97%, 98%, or 99% sequence identity) thereto; or a nucleotide sequence having at least one, two, three, four, five, six, or seven modifications, e.g., substitutions (e.g., conservative substitutions), but no more than ten modifications, e.g., substitutions (e.g., conservative substitutions), relative to SEQ ID NO: 4676.
[0340] E124. The AAV viral genome of any one of embodiments E108-E123, wherein the viral genome comprises:
   [0341] (A) (i) a first encoded miR183 binding site comprising the nucleotide sequence of SEQ ID NO: 4676, or a nucleotide sequence substantially identical (e.g., having at least 70%, 75%, 80%, 85%, 90%, 92%, 95%, 97%, 98%, or 99% sequence identity) thereto; or a nucleotide sequence having at least one, two, three, four, five, six, or seven modifications, e.g., substitutions (e.g., conservative substitutions), but no more than ten modifications, e.g., substitutions (e.g., conservative substitutions), relative to SEQ ID NO: 4676;
   [0342] (ii) a first spacer comprising the nucleotide sequence of GATAGTTA, or a nucleotide sequence having at least one, two, or three modifications, e.g., substitutions (e.g., conservative substitutions), but no more than four modifications, e.g., substitutions (e.g., conservative substitutions), relative to GATAGTTA; and
   [0343] (iii) a second encoded miR183 binding site comprising the nucleotide sequence of SEQ ID NO: 4676, or a nucleotide sequence substantially identical (e.g., having at least 70%, 75%, 80%, 85%, 90%, 92%, 95%, 97%, 98%, or 99% sequence identity) thereto; or a nucleotide sequence having at least one, two, three, four, five, six, or seven modifications, e.g., substitutions (e.g., conservative substitutions), but no more than ten modifications, e.g., substitutions (e.g., conservative substitutions), relative to SEQ ID NO: 4676; or
   [0344] (B) (i) a first encoded miR183 binding site comprising the nucleotide sequence of SEQ ID NO: 4676, or a nucleotide sequence substantially identical (e.g., having at least 70%, 75%, 80%, 85%, 90%, 92%, 95%, 97%, 98%, or 99% sequence identity) thereto; or a nucleotide sequence having at least one, two, three, four, five, six, or seven modifications, e.g., substitutions (e.g., conservative substitutions), but no more than ten modifications, e.g., substitutions (e.g., conservative substitutions), relative to SEQ ID NO: 4676;
   [0345] (ii) a first spacer comprising the nucleotide sequence of GATAGTTA, or a nucleotide sequence having at least one, two, or three modifications, e.g., substitutions (e.g., conservative substitutions), but no more than four modifications, e.g., substitutions (e.g., conservative substitutions), relative to GATAGTTA;
   [0346] (iii) a second encoded miR183 binding site comprising the nucleotide sequence of SEQ ID NO: 4676, or a nucleotide sequence substantially identical (e.g., having at least 70%, 75%, 80%, 85%, 90%, 92%, 95%, 97%, 98%, or 99% sequence identity) thereto; or a nucleotide sequence having at least one, two, three, four, five, six, or seven modifications, e.g., substitutions (e.g., conservative substitutions), but no more than ten modifications, e.g., substitutions (e.g., conservative substitutions), relative to GATAGTTA;
   [0347] (iv) a second spacer comprising the nucleotide sequence of GATAGTTA, or a nucleotide sequence having at least one, two, or three modifications, e.g., substitutions (e.g., conservative substitutions), but no more than four modifications, e.g., substitutions (e.g., conservative substitutions), relative to GATAGTTA; and
   [0348] (v) a third encoded miR183 binding site comprising the nucleotide sequence of SEQ ID NO: 4676, or a nucleotide sequence substantially identical (e.g., having at least 70%, 75%, 80%, 85%, 90%, 92%, 95%, 97%, 98%, or 99% sequence identity) thereto; or a nucleotide sequence having at least one, two, three, four, five, six, or seven modifications, e.g., substitutions (e.g., conservative substitutions), but no more than ten modifications, e.g., substitutions (e.g., conservative substitutions), relative to SEQ ID NO: 4676.
[0349] E125. The AAV viral genome of any one of embodiments E108-E124, wherein the viral genome comprises an encoded miR122 binding site and a miR-1 binding site.
[0350] E126. The AAV viral genome of any one of embodiments E108-E125, wherein the viral genome is single stranded or self-complementary.
[0351] E127. The AAV viral genome of any one of embodiments E108-E126, wherein the viral genome further comprises a nucleotide sequence encoding a Rep protein, e.g., a non-structural protein, wherein the Rep protein comprises a Rep78 protein, a Rep68, Rep52 protein, and/or a Rep40 protein.
[0352] E128. The AAV viral genome of embodiment E127, wherein the Rep78 protein, the Rep68 protein, the Rep52 protein, and/or the Rep40 protein are encoded by at least one Rep gene.
[0353] E129. An adeno-associated virus (AAV) particle comprising the AAV viral genome of any one of embodiments E73-E128.
[0354] E130. The AAV particle of embodiment E129, which further comprises an AAV capsid protein, e.g., an AAV capsid variant.
[0355] E131. The AAV particle of embodiment E130, wherein the AAV capsid protein comprises an VOY101, VOY201, AAVPHP.B (PHP.B), AAVPHP.A (PHP.A), AAVG2B-26, AAVG2B-13, AAVTH1.1-32, AAVTH1.1-35, AAVPHP.B2 (PHP.B2), AAVPHP.B3 (PHP.B3), AAVPHP.N/PHP.B-DGT, AAVPHP.B-EST, AAVPHP.B-GGT, AAVPHP.B-ATP, AAVPHP.B-ATT-T, AAVPHP.B-DGT-T, AAVPHP.B-GGT-T, AAVPHP.B-SGS, AAVPHP.B-AQP, AAVPHP.B-QQP, AAVPHP.B-SNP(3), AAVPHP.B-SNP, AAVPHP.B-QGT, AAVPHP.B-NQT, AAVPHP.B-EGS, AAVPHP.B-SGN, AAVPHP.B-EGT, AAVPHP.B-DST, AAVPHP.B-DST, AAVPHP.B-STP, AAVPHP.B-PQP, AAVPHP.B-SQP, AAVPHP.B-QLP, AAVPHP.B-TMP, AAVPHP.B-TTP, AAVPHP.S/G2A12, AAVG2A15/G2A3 (G2A3), AAVG2B4 (G2B4), AAVG2B5 (G2B5), AAVPHP.N (PHP.N), PHP.S, AAV1, AAV2, AAV2 variant, AAV2/3 variant, AAV4, AAV5, AAV6, AAV7, AAV8, AAV9.47, AAV9(hul4), AAV9, AAV9 K449R, AAV10, AAV11, AAV12, AAVrh8, AAVrh10, AAVDJ, AAVDJ8, or AAV2G9 capsid protein, or a functional variant thereof.
[0356] E132. The AAV particle of embodiment E130 or E131, wherein the AAV capsid protein is an AAV2 capsid protein or a variant thereof, an AAV5 capsid protein or a variant thereof, an AAV9 capsid protein or a variant thereof.
[0357] E133. The AAV particle of any one of embodiments E130-E132, wherein the AAV capsid protein comprises any of the AAV capsid proteins listed in Table 1A, 37A, 38A, or 39A, or a functional variant thereof.
[0358] E134. The AAV particle of any one of embodiments E130-E133, wherein the AAV capsid variant comprises:

(SEQ ID NO: 3678)
(i) PLNG;
(SEQ ID NO: 3679)
(ii) PLNGA;
(SEQ ID NO: 3680)
(iii) PLNGAV;
(SEQ ID NO: 3681)
(iv) PLNGAVH;
(SEQ ID NO: 3682)
(v) PLNGAVHL;
or
(SEQ ID NO: 3648)
(vi) PLNGAVHLY;

[0359] (vi) PLNGAVHLY (SEQ ID NO: 3648); and wherein the capsid variant comprises the amino acid sequence of SEQ ID NO: 138, or an amino acid sequence with at least 95% sequence identity thereto.
[0360] E135. The AAV particle of embodiment E134, wherein the amino acid sequence of (i), (ii), (iii), (iv), (v), (vi) is present in loop VIII, relative to a reference sequence of SEQ ID NO: 138.
[0361] EE136. The AAV particle of embodiment E134 or E135, wherein the amino acid sequence of (i), (ii), (iii), (iv), (v), (vi) is present immediately subsequent to position 586 and optionally replaces amino acids 587 and 588, numbered according to the amino acid sequence of SEQ ID NO: 138.
[0362] E137. The AAV particle of any one of embodiments E130-E134, comprising:
   [0363] (i) the amino acid sequence of PLNGAVHLY (SEQ ID NO: 3648), wherein the amino acid sequence of PLNGAVHLY (SEQ ID NO: 3648) is present immediately subsequent to position 586, and optionally replaces positions 587 and 588, numbered according to the amino acid sequence of SEQ ID NO: 138;
   [0364] (ii) the amino acid sequence of GGTLAVVSL (SEQ ID NO: 3654), wherein the amino acid sequence of GGTLAVVSL (SEQ ID NO: 3654) is present immediately subsequent to position 586, and optionally replaces positions 587 and 588, numbered according to the amino acid sequence of SEQ ID NO: 138;
   [0365] (iii) the amino acid sequence of IVMNSLK (SEQ ID NO: 3651), wherein the amino acid sequence of IVMNSLK (SEQ ID NO: 3651) is present immediately subsequent to position 588, numbered according to the amino acid sequence of SEQ ID NO: 138; or
   [0366] (iv) the amino acid sequence of any of SEQ ID NOs: 3649, 3650, 3652, 3653, or 3655-3659, wherein the amino acid sequence of any of the aforesaid sequences is present immediately subsequent to position 589, numbered according to the amino acid sequence of SEQ ID NO: 138.
[0367] E138. The AAV particle of any one of embodiments E130-E137, wherein:
   [0368] (i) the capsid variant further comprises a substitution at position K449, numbered according to SEQ ID NO: 138;
   [0369] (ii) the capsid variant further comprises an insertion, substitution, and/or deletion, in loop I, II, IV and/or VI;
   [0370] (iii) the capsid variant comprises an amino acid residue other than “A” at position 587 and/or an amino acid residue other than “Q” at position 588, numbered according to SEQ ID NO: 138; or
   [0371] (iv) the nucleotide sequence encoding the capsid variant comprises the nucleotide sequence of SEQ ID NO: 137, or a sequence with at least 95% sequence identity thereto.
[0372] E139. The AAV particle of any one of embodiments E130-E138, wherein:
   [0373] (i) the AAV capsid variant comprises the amino acid sequence of any one of SEQ ID NOs: 5, 8, or 3636-3647, or an amino acid sequence with at least 95% sequence identity thereto; or
   [0374] (ii) the nucleotide sequence encoding the AAV capsid variant comprises the nucleotide sequence of any one of SEQ ID NOs: 5, 8, or 3623-3635, or a nucleotide sequence with at least 90% sequence identity thereto.
[0375] E140. An isolated, e.g., recombinant, antibody encoded by the nucleic acid of any one of embodiments E70-E72 or the AAV viral genome of any one of embodiments E73-E128.
[0376] E141. A vector comprising the nucleic acid of any one of embodiments E70-E72 or the AAV viral genome of any one of embodiments E73-E128.
[0377] E142. A host cell comprising the nucleic acid of any one of embodiments E70-E72, the AAV viral genome of any one of embodiments E73-E128, the AAV particle of any one of embodiments E129-E139, or the vector of embodiment E141.
[0378] E143. The host cell of embodiment E142, wherein the host cell is a bacterial cell or a mammalian cell.
[0379] E144. A composition (e.g., a pharmaceutical composition) comprising the antibody of any one of embodiments E1-E68, an AAV particle comprising the AAV viral genome of any one of embodiment E73-E128, or the AAV particle of any one of embodiments E129-E139, and a carrier (e.g., a pharmaceutically-acceptable carrier).
[0380] E145. A method of producing an antibody which binds to human tau, the method comprising culturing the host cell of embodiment E142 or E143, under conditions suitable for gene expression.
[0381] E146. A method of delivering to a subject an exogenous antibody that binds to human tau, the method comprising administering to the subject an effective amount of the antibody of any one of embodiments E1-E68, an AAV particle comprising the AAV viral genome of any one of embodiment E73-E128, the AAV particle of any one of embodiments E129-E139, or the composition (e.g., a pharmaceutical composition) of embodiment E144.
[0382] E147. The method of embodiment E146, wherein the subject has, has been diagnosed with having, or is at risk of having a disease associated with expression of tau.
[0383] E148. The method of embodiment E146 or E147, wherein the subject has, has been diagnosed with having, or is at risk of having a neurological, e.g., neurodegenerative disorder.
[0384] E149. The method of any one of embodiments E146-E148, wherein the subject has, has been diagnosed with having, or is at risk of having a tauopathy.
[0385] E150. A method of treating a subject having or diagnosed with having a disease associated with expression of tau, the method comprising administering to the subject an effective amount of the antibody of any one of embodiments E1-E68, an AAV particle comprising the AAV viral genome of any one of embodiment E73-E128, the AAV particle of any one of embodiments E129-E139, or the composition (e.g., a pharmaceutical composition) of embodiment E144.
[0386] E151. A method of treating a subject having or diagnosed with having a neurological, e.g., neurodegenerative disorder, the method comprising administering to the subject an effective amount of the antibody of any one of embodiments E1-E68, an AAV particle comprising the AAV viral genome of any one of embodiment E73-E128, the AAV particle of any one of embodiments E129-E139, or the composition (e.g., a pharmaceutical composition) of embodiment E144.
[0387] E152. A method of treating a subject having or diagnosed with having a tauopathy, the method comprising administering to the subject an effective amount of the antibody of any one of embodiments E1-E68, an AAV particle comprising the AAV viral genome of any one of embodiment E73-E128, the AAV particle of any one of embodiments E129-E139, or the composition (e.g., a pharmaceutical composition) of embodiment E144.
[0388] E153. The method of any one of embodiments E147-E152, wherein the disease associated with tau expression, the neurological disorder, or the tauopathy comprises Alzheimer's disease (AD), frontotemporal dementia and parkinsonism linked to chromosome 17 (FTDP-17), frontotemporal lobar degeneration (FTLD), frontotemporal dementia (FTD), chronic traumatic encephalopathy (CTE), progressive supranuclear palsy (PSP), Down's syndrome, Pick's disease, corticobasal degeneration (CBD), corticobasal syndrome, amyotrophic lateral sclerosis (ALS), prion diseases, Creutzfeldt-Jakob disease (CJD), multiple system atrophy, tangle-only dementia, or progressive subcortical gliosis.
[0389] E154. The method of any one of embodiments E150-E153, wherein treating comprises prevention of progression of the disease or disorder in the subject.
[0390] E155. The method of any one of embodiments E146-E154, wherein the subject is human.
[0391] E156. The method of any one of embodiments E146-E155, which is administered intravenously.
[0392] E157. The method of any one of embodiments E146-E156, wherein administration of the antibody results in a decreased presence, level, and/or activity of tau protein.
[0393] E158. The method of any one of embodiments E146-E157, further comprising administration of an additional therapeutic agent and/or therapy suitable for treatment or prevention of a disorder associated with tau expression, a neurological, e.g., neurodegenerative, disorder.
[0394] E159. The method of embodiment E158, wherein the additional therapeutic agent and/or therapy comprises a cholinesterase inhibitor (e.g., donepezil, rivastigmine, and/or galantamine), an N-methyl D-aspartate (NMDA) antagonist (e.g., memantine), an antipsychotic drug, an anti-anxiety drug, an anticonvulsant, a dopamine agonist (e.g., pramipexole, ropinirole, rotigotine, and/or apomorphine), an MAO B inhibitor (e.g., selegiline, rasagiline, and/or safinamide), catechol O-methyltransferase (COMT) inhibitors (entacapone, opicapone, and/or tolcapone), anticholinergics (e.g., benztropine and/or trihexyphenidyl), amantadine, carbidopa-levodopa, deep brain simulation (DBS), or a combination thereof.
[0395] E160. A method of diagnosing a neurological disorder, a neurodegenerative disorder, a disease associated with tau expression or activity, or a tau-related disease (e.g., tauopathy) in a subject, the method comprising the use of the antibody of any one of embodiments E1-E68, an AAV particle comprising the AAV viral genome of any one of embodiment E73-E128, or the AAV particle of any one of embodiments E129-E139.
[0396] E161. A method of detecting tau, the method comprising contacting a sample (e.g., a biological sample such as human tissue, e.g., human CNS tissue) with the antibody of any one of embodiments E1-E68, an AAV particle comprising the AAV viral genome of any one of embodiment E73-E128, or the AAV particle of any one of embodiments E129-E139, and detecting the formation of a complex between the antibody and tau.
[0397] E162. The method of embodiment E161, wherein the tissue is a thin tissue section or cryopreserved tissue section.
[0398] E163. The antibody of any one of embodiments E1-E68, an AAV particle comprising the AAV viral genome of any one of embodiment E73-E128, the AAV particle of any one of embodiments E129-E139, or the composition of embodiment E144, for use in a method of treating a neurological disorder, a neurodegenerative disorder, a disease associated with tau expression or activity, or a tau-related disease (e.g., tauopathy).
[0399] E164. The antibody of any one of embodiments E1-E68, an AAV particle comprising the AAV viral genome of any one of embodiment E73-E128, the AAV particle of any one of embodiments E129-E139, or the composition of embodiment E144, for use in the manufacture of a medicament.
[0400] E165. The antibody of any one of embodiments E1-E68, an AAV particle comprising the AAV viral genome of any one of embodiment E73-E128, the AAV particle of any one of embodiments E129-E139, or the composition of embodiment E144, for use in the manufacture of a medicament for treating a neurological disorder, a neurodegenerative disorder, a disease associated with tau expression or activity, or a tau-related disease (e.g., tauopathy).
[0401] E166. Use of the antibody of any one of embodiments E1-E68, an AAV particle comprising the AAV viral genome of any one of embodiment E73-E128, the AAV particle of any one of embodiments E129-E139, or the composition of embodiment E144 in the manufacture of a medicament.
[0402] E167. Use of the antibody of any one of embodiments E1-E68, an AAV particle comprising the AAV viral genome of any one of embodiment E73-E128, the AAV particle of any one of embodiments E129-E139, or the composition of embodiment E144 in the manufacture of a medicament for treating a neurological disorder, a neurodegenerative disorder, a disease associated with tau expression or activity, or a tau-related disease (e.g., tauopathy).

### Additional Enumerated Embodiments

[0403] 20. An isolated, e.g., recombinant, AAV particle comprising an AAV capsid variant and a nucleic acid comprising a transgene encoding an antibody that binds to human tau (e.g., SEQ ID NO: 1404), wherein the AAV capsid variant comprises an amino sequence comprising the following formula: [N1]-[N2], wherein:
   [0404] (i) [N1] comprises X1, X2, X3, X4, and X5, wherein:
      [0405] (a) position X1 is: P, Q, A, H, K, L, R, S, or T;
      [0406] (b) position X2 is: L, I, V, H, or R;
      [0407] (c) position X3 is: N, D, I, K, or Y;
      [0408] (d) position X4 is: G, A, C, R, or S; and
      [0409] (e) position X5 is: A, S, T, G, C, D, N, Q, V, or Y; and
   [0410] (ii) [N2] comprises the amino acid sequence of VHLY (SEQ ID NO: 4680), VHIY (SEQ ID NO: 4681), VHVY (SEQ ID NO: 4682), or VHHY (SEQ ID NO: 4683); and/or an amino acid modification, e.g., a conservative substitution, of any of the aforesaid amino acids in (i) and/or (ii);
   [0411] optionally wherein the AAV capsid variant further comprises:
   [0412] (a) one, two, or all of an amino acid other than T at position 593 (e.g., V, L, R, S, A, C, I, K, M, N, P, or Q), an amino acid other than G at position 594 (e.g., S, A, T, M, V, Q, L, H, I, K, N, P, R, or Y), and/or an amino acid other than W at position 595 (e.g., S, P, G, A, Q, L, M, K, C, E, F, H, R, T, V, or Y), relative to a reference sequence numbered according to the amino acid sequence of SEQ ID NO: 138; and/or
   [0413] (b) one, two, or all of an amino acid other than V at position 596 (e.g., D, F, G, L, A, E, or I), an amino acid other than Q at position 597 (e.g., P, K, R, H, E, or L), and/or an amino acid other than N at position 598 (e.g., T, K, H, D, Y, S, I, or P), relative to a reference sequence numbered according to the amino acid sequence of SEQ ID NO: 138;
   [0414] (c) the amino acid L, T, V, R, S, A, C, I, K, M, N, P, or Q at position 600, the amino acid S, G, A, T, M, V, Q, L, H, I, K, N, P, R, or Y at position 601, and the amino P, W, S, G, A, Q, L, M, K, C, E, F, H, R, T, V, or Y at position 602, numbered according to the amino acid sequence of SEQ ID NO: 5, 8, 3636, wherein the AAV capsid variant does not comprise the amino acid sequence TGW at position 600-602, numbered according to SEQ ID NO: 5, 8, or 3636; and/or
   [0415] (d) the amino acid V, D, F, G, L, A, E, or I at position 603, the amino acid K, P, Q, R, H, E, or L at position 604, and the amino acid N, T, K, H, D, Y, S, I, or P, numbered according to the amino acid sequence of SEQ ID NO: 5, 8, or 3636, wherein the AAV capsid variant does not comprise the amino acid sequence VQN at position 603-605, numbered according to SEQ ID NO: 5, 8, or 3636; and/or
   [0416] (e) one, two, three, four, or all of an amino acid other then P at position X1, an amino acid other than L at position X2, an amino acid other than N at position X3, an amino acid other than G at position X4, or an amino acid other than A at position X5.
[0417] 21. An isolated, e.g., recombinant, AAV particle comprising an AAV capsid variant and a nucleic acid comprising a transgene encoding an antibody that binds to human tau (e.g., SEQ ID NO: 1404), wherein the AAV capsid variant comprises one, two, three, four, or all of:
   [0418] (i) an [N1], wherein [N1] is or comprises: PLNGA (SEQ ID NO: 3679), SLNGA (SEQ ID NO: 4684), QLNGA (SEQ ID NO: 4685), ALNGA (SEQ ID NO: 4686), PLNGS (SEQ ID NO: 4687), PVNGA (SEQ ID NO: 4688), PLNGG (SEQ ID NO: 4689), PLNGT (SEQ ID NO: 4690), PLDGA (SEQ ID NO: 4691), QLNGS (SEQ ID NO: 4692), PLNGN (SEQ ID NO: 4693), SLDGA (SEQ ID NO: 4694), HLNGA (SEQ ID NO: 4695), ALNGT (SEQ ID NO: 4696), PINGA (SEQ ID NO: 4697), ALDGA (SEQ ID NO: 4698), PLNCA (SEQ ID NO: 4699), PLNGQ (SEQ ID NO: 4700), PLDSA (SEQ ID NO: 4701), RLDGA (SEQ ID NO: 4702), QLNGN (SEQ ID NO: 4703), PLNGY (SEQ ID NO: 4704), PLDSS (SEQ ID NO: 4705), PLNGC (SEQ ID NO: 4706), PLYGA (SEQ ID NO: 4707), TLNGA (SEQ ID NO: 4708), PVDGA (SEQ ID NO: 4709), PLKGA (SEQ ID NO: 4710), PLNGD (SEQ ID NO: 4711), KLDGA (SEQ ID NO: 4712), PHNGA (SEQ ID NO: 4713), PLNGV (SEQ ID NO: 4714), PLNAA (SEQ ID NO: 4715), QLNGY (SEQ ID NO: 4716), PLDGS (SEQ ID NO: 4717), LLNGA (SEQ ID NO: 4718), PLNRA (SEQ ID NO: 4719), PLIGA (SEQ ID NO: 4720), PRNGA (SEQ ID NO: 4721), or ALNGS (SEQ ID NO: 4722);
   [0419] (ii) an [N2] wherein [N2] is or comprises: VHLY (SEQ ID NO: 4680), VHVY (SEQ ID NO: 4682), VPLY (SEQ ID NO: 4723), VNLY (SEQ ID NO: 4724), VHRY (SEQ ID NO: 4725), VHIY (SEQ ID NO: 4681), VHHY (SEQ ID NO: 4683), FHLY (SEQ ID NO: 4726), LHLY (SEQ ID NO: 4727), DHLY (SEQ ID NO: 4728), VQLY (SEQ ID NO: 4729), IHLY (SEQ ID NO: 4730), VDLY (SEQ ID NO: 4731), AHLY (SEQ ID NO: 4732), VLLY (SEQ ID NO: 4733), GHLY (SEQ ID NO: 4734), VRLY (SEQ ID NO: 4735), or VYLY (SEQ ID NO: 4736);
   [0420] (iii) an [N3] wherein [N3] is or comprises: AQAQ (SEQ ID NO: 4737), SQAQ (SEQ ID NO: 4738), AQPQ (SEQ ID NO: 4739), AQSQ (SEQ ID NO: 4740), AKAQ (SEQ ID NO: 4741), AHAQ (SEQ ID NO: 4742), AQAP (SEQ ID NO: 4743), DQAQ (SEQ ID NO: 4744), APAQ (SEQ ID NO: 4745), AQAK (SEQ ID NO: 4746), AQAH (SEQ ID NO: 4747), AQEQ (SEQ ID NO: 4748), ALAQ (SEQ ID NO: 4749), ARAQ (SEQ ID NO: 4750), or TQAQ (SEQ ID NO: 4751);
   [0421] (iv) an [N4] wherein [N4] is or comprises: TGW, TGL, TGS, TGG, TAW, TGR, TAS, LSS, TSS, SSL, SSS, TLS, TVS, VSS, TSP, VSP, TMS, LSP, VAS, TAL, TTS, TLP, VLP, RGW, LSG, LAS, SSP, LLP, STS, TSA, TTP, SAL, LGS, VTP, VSA, IGW, TGF, LTP, TLA, LSA, TVG, TAP, TMP, TSL, VQS, SSM, SLP, VSQ, RSS, TST, VMS, TTA, TQP, LST, LAP, TVA, RLS, TGY, TSG, TAG, VMP, TSQ, TMA, VGS, TSW, TGV, TGT, TLG, LMP, VQP, TGM, SMS, SQL, IGS, RSV, TAA, STP, LSQ, TAQ, TGP, ASP, VSG, SAP, TLQ, LQP, TAT, TGQ, ATS, IGG, VAA, TSM, TVW, TAM, TGA, VAT, QSP, TQA, VQA, RSP, LAT, VAQ, LAA, RST, RTL, LGT, LMS, LGP, RTS, SQP, VLG, SVS, TMQ, SAV, LAG, SGP, TNS, RLT, TTQ, SAA, TSV, RLG, RAS, STQ, CSP, SAG, ALP, VTS, ISP, SVG, LTS, TTT, RSG, TQL, LNP, TVQ, IAS, LAQ, LSR, LSN, TTG, TSN, SMA, TKS, SVA, TQQ, VQQ, RLP, SAM, TAV, TQW, SSR, TQT, VNS, RSA, LMG, RQS, LVG, VTA, RTT, SMG, VMA, TKP, SAQ, NSP, ATP, VAG, RGS, VKP, RMS, NLP, NAL, RTP, RQL, VQG, VTG, VST, NAS, RVE, ATG, AMS, RNS, VMQ, SMQ, LQQ, TMG, LGQ, TSH, AAP, RSQ, TYS, ITP, VAK, TQM, TKA, SQQ, ISG, VSR, RTA, RML, SQM, VAN, CTP, ISS, AGP, TAK, RTG, LHP, TMT, AQP, QAP, RQP, LKS, NTT, TSK, RYS, KSS, NTP, VGG, IAA, LMA, MAP, VHP, VLS, LAN, ATQ, TNA, TAN, VSN, AAA, AVG, LTA, SAN, RAG, RQG, TLR, LSH, SAF, RAA, IQP, ILG, VNG, SVQ, LSK, TNG, RTQ, TMN, RGG, TTR, VRP, VKA, LAR, NQP, TMK, TYA, TQK, TTK, IAG, TQN, LAH, NTQ, RQQ, RAQ, TKQ, TQH, TNQ, LMQ, VNA, VQT, TQR, VGK, VKQ, IQS, LQR, TMM, VGN, RIG, SAK, RIA, VQN, NVQ, RIP, NAQ, NMQ, TPS, LTN, VTK, PGW, LPP, SPP, TPA, TGC, VPP, TPT, TPW, TPP, RPP, TPQ, TPR, TPG, VPA, VPQ, RPG, KGW, TRW, TAR, IPP, RSL, LVP, KGS, VAP, KGG, KAW, PGS, TRL, or AGW; and/or
   [0422] (v) an [N5] wherein [N5] is or comprises: VQN, VKN, VQT, VQK, DQN, VQH, GQN, VQI, VHN, FQN, LQN, VLN, VRN, VQS, VQY, AQN, VEN, VQD, VPN, IQN, VKK, DKN, VKT, VQP, EQN, GQT, FQK, GHN, or VPH; and/or
   [0423] wherein the AAV capsid variant comprises an amino acid modification, e.g., a conservative substitution, of any of the aforesaid amino acids in (i)-(v).
[0424] 22. The isolated AAV particle of embodiment 20, wherein:
   [0425] (a) position X1 is: P, Q, A, S, or T;
   [0426] (b) position X2 is L or I;
   [0427] (c) position X3 is N or D;
   [0428] (d) position X4 is G or S; and/or
   [0429] (e) position X5 is: A, S, G, T, or N.
[0430] 23. The isolated AAV particle of embodiment 20 or 22, wherein [N1] comprises AL, PI, PL, QL, SL, TL, LN, LD, IN, NG, DG, DS, GA, SA, SS, GG, GN, GS, or GT.
[0431] 24. The isolated AAV particle of any one of embodiments 20, 22, or 23, wherein [N1] comprises ALD, ALN, PIN, PLD, PLN, QLN, SLD, SLN, TLN, LNG, LDG, ING, LDS, NGA, DGA, DSA, DSS, NGG, NGN, NGS, NGT.
[0432] 25. The isolated AAV particle of any one of embodiments 20 or 22-24, wherein [N1] comprises ALDG (SEQ ID NO: 4762), ALNG (SEQ ID NO: 4758), PING (SEQ ID NO: 4763), PLDG (SEQ ID NO: 4764), PLDS (SEQ ID NO: 4765), PLNG (SEQ ID NO: 3678), QLNG (SEQ ID NO: 4766), SLDG (SEQ ID NO: 4767), SLNG (SEQ ID NO: 4756), or TLNG (SEQ ID NO: 4754).
[0433] 26. The isolated AAV particle of any one of embodiments 20-25, wherein [N1] is or comprises PLNGA (SEQ ID NO: 3679), SLNGA (SEQ ID NO: 4684), QLNGA (SEQ ID NO: 4685), ALNGA (SEQ ID NO: 4686), PLNGS (SEQ ID NO: 4687), PVNGA (SEQ ID NO: 4688), PLNGG (SEQ ID NO: 4689), PLNGT (SEQ ID NO: 4690), PLDGA (SEQ ID NO: 4691), QLNGS (SEQ ID NO: 4692), PLNGN (SEQ ID NO: 4693), SLDGA (SEQ ID NO: 4694), HLNGA (SEQ ID NO: 4695), ALNGT (SEQ ID NO: 4696), PINGA (SEQ ID NO: 4697), ALDGA (SEQ ID NO: 4698), PLNCA (SEQ ID NO: 4699), PLNGQ (SEQ ID NO: 4700), PLDSA (SEQ ID NO: 4701), RLDGA (SEQ ID NO: 4702), QLNGN (SEQ ID NO: 4703), PLNGY (SEQ ID NO: 4704), PLDSS (SEQ ID NO: 4705), PLNGC (SEQ ID NO: 4706), PLYGA (SEQ ID NO: 4707), TLNGA (SEQ ID NO: 4708), PVDGA (SEQ ID NO: 4709), PLKGA (SEQ ID NO: 4710), PLNGD (SEQ ID NO: 4711), KLDGA (SEQ ID NO: 4712), PHNGA (SEQ ID NO: 4713), PLNGV (SEQ ID NO: 4714), PLNAA (SEQ ID NO: 4715), QLNGY (SEQ ID NO: 4716), PLDGS (SEQ ID NO: 4717), LLNGA (SEQ ID NO: 4718), PLNRA (SEQ ID NO: 4719), PLIGA (SEQ ID NO: 4720), PRNGA (SEQ ID NO: 4721), or ALNGS (SEQ ID NO: 4722).
[0434] 27. The isolated AAV particle of embodiment 20-26, wherein [N1] is or comprises PLNGA (SEQ ID NO: 3679), ALDGA (SEQ ID NO: 4698), ALNGA (SEQ ID NO: 4686), PINGA (SEQ ID NO: 4697), PLDGA (SEQ ID NO: 4691), PLDSA (SEQ ID NO: 4701), PLDSS (SEQ ID NO: 4705), PLNGG (SEQ ID NO: 4689), PLNGN (SEQ ID NO: 4693), PLNGS (SEQ ID NO: 4687), PLNGT (SEQ ID NO: 4690), QLNGA (SEQ ID NO: 4685), SLDGA (SEQ ID NO: 4694), SLNGA (SEQ ID NO: 4684), or TLNGA (SEQ ID NO: 4708).
[0435] 28. The isolated AAV particle of embodiment 20-27, wherein [N1] is or comprises PLNGA (SEQ ID NO: 3679).
[0436] 29. The isolated AAV particle of any one of embodiments 20 or 22-23 or 25-28, wherein [N1]-[N2] comprises:

(SEQ ID NO: 4768)
(i) LDGAVHLY,
(SEQ ID NO: 4769)
LNGAVHLY,
(SEQ ID NO: 4770)
INGAVHLY,
(SEQ ID NO: 4771)
LDSAVHLY,
(SEQ ID NO: 4772)
LDSSVHLY,
(SEQ ID NO: 4773)
LNGGVHLY,
(SEQ ID NO: 4774)
LNGNVHLY,
(SEQ ID NO: 4775)
LNGSVHLY,
(SEQ ID NO: 4776)
LNGTVHLY,
(SEQ ID NO: 4777)
LNGAVHIY,
(SEQ ID NO: 4778)
LDGAVHVY,
or
(SEQ ID NO: 4779)
LNGAVHHY;

[0437] (i) LDGAVHLY (SEQ ID NO: 4768), LNGAVHLY (SEQ ID NO: 4769), INGAVHLY (SEQ ID NO: 4770), LDSAVHLY (SEQ ID NO: 4771), LDSSVHLY (SEQ ID NO: 4772), LNGGVHLY (SEQ ID NO: 4773), LNGNVHLY (SEQ ID NO: 4774), LNGSVHLY (SEQ ID NO: 4775), LNGTVHLY (SEQ ID NO: 4776), LNGAVHIY (SEQ ID NO: 4777), LDGAVHVY (SEQ ID NO: 4778), or LNGAVHHY (SEQ ID NO: 4779);
[0438] (ii) an amino acid sequence comprising any portion of an amino acid sequence in (i), e.g., any 2, 3, 4, 5, 6, or 7 amino acids, e.g., consecutive amino acids, thereof;
[0439] (iii) an amino acid sequence comprising at least one, two, or three but no more than four modifications, e.g., substitutions (e.g., conservative substitutions), insertions, or deletions, relative to any of the amino acid sequences in (i); or
[0440] (iv) an amino acid sequence comprising at least one, two, or three but no more than four different amino acids, relative to any one of the amino acid sequences in (i).
[0441] 30. The isolated AAV particle of any one of embodiments 20-29, wherein [N1]-[N2] is or comprises:

(SEQ ID NO: 3648)
(i) PLNGAVHLY,
(SEQ ID NO: 4780)
ALDGAVHLY,
(SEQ ID NO: 4781)
ALNGAVHLY,
(SEQ ID NO: 4782)
PINGAVHLY,
(SEQ ID NO: 4783)
PLDGAVHLY,
(SEQ ID NO: 4784)
PLDSAVHLY,
(SEQ ID NO: 4785)
PLDSSVHLY,
(SEQ ID NO: 4786)
PLNGGVHLY,
(SEQ ID NO: 4787)
PLNGNVHLY,
(SEQ ID NO: 4788)
PLNGSVHLY,
(SEQ ID NO: 4789)
PLNGTVHLY,
(SEQ ID NO: 4790)
QLNGAVHLY,
(SEQ ID NO: 4791)
SLDGAVHLY,
(SEQ ID NO: 4792)
SLNGAVHLY,
(SEQ ID NO: 4793)
TLNGAVHLY,
(SEQ ID NO: 4794)
PLNGAVHIY,
(SEQ ID NO: 4795)
PLDGAVHVY,
or
(SEQ ID NO: 4796)
PLNGAVHHY;

[0442] (ii) an amino acid sequence comprising any portion of an amino acid sequence in (i), e.g., any 2, 3, 4, 5, 6, 7, or 8 amino acids, e.g., consecutive amino acids, thereof;
[0443] (iii) an amino acid sequence comprising at least one, two, or three but no more than four modifications, e.g., substitutions (e.g., conservative substitutions), insertions, or deletions, relative to any of the amino acid sequences in (i); or
[0444] (iv) an amino acid sequence comprising at least one, two, or three but no more than four different amino acids, relative to any one of the amino acid sequences in (i).
[0445] 31. The isolated AAV particle of any one of embodiments 20-30, wherein [N1]-[N2] is or comprises PLNGAVHLY (SEQ ID NO: 3648).
[0446] 32. The isolated AAV particle of any one of embodiments 20-31, wherein the AAV capsid variant further comprises one, two, three, or all of an amino acid other than A at position 589 (e.g., D, S, or T), an amino acid other than Q at position 590 (e.g., K, H, L, P, or R), an amino acid other than A at position 591 (e.g., P, E, or R), and/or an amino acid other than Q at position 592 (e.g., H, K, or P).
[0447] 33. The isolated AAV particle of any one of embodiments 20-32, wherein the AAV capsid variant further comprises one, two, three, or all of an amino acid other than A at position 596 (e.g., D, S, or T), an amino acid other than Q at position 597 (e.g., K, H, L, P, or R), an amino acid other than A at position 598 (e.g., P, E, or R), and/or an amino acid other than Q at position 599 (e.g., H, K, or P), numbered according to the amino acid sequence of SEQ ID NO: 5, 8, or 3636.
[0448] 34. The isolated AAV particle of any one of embodiments 20-31, wherein the AAV capsid variant further comprises
   [0449] (i) A at position 589, Q at position 590, A at position 591, and/or Q at position 592, numbered according to the amino acid sequence of SEQ ID NO: 138; or
   [0450] (ii) A at position 596, Q at position 597, A at position 598, and/or Q at position 599, numbered according to the amino acid sequence of SEQ ID NO: 5, 8, or 3636.
[0451] 35. The isolated AAV particle of any one of embodiments 20 or 22-34, wherein the AAV capsid variant further comprises [N3], wherein [N3] comprises X6, X7, X8, and X9, wherein:
   [0452] (a) position X6 is: A, D, S, or T;
   [0453] (b) position X7 is: Q, K, H, L, P, or R;
   [0454] (c) position X8 is: A, P, E, or R; and
   [0455] (d) position X9 is: Q, H, K, or P; and/or an amino acid modification, e.g., a conservative substitution, of any of the aforesaid amino acids in (a)-(d).
[0456] 36. The isolated AAV particle of embodiment 35, wherein:
   [0457] (a) position X6 is: A, D, S;
   [0458] (b) position X7 is Q or K;
   [0459] (c) position X8 is A or P; and/or
   [0460] (d) position X9 is Q.
[0461] 37. The isolated AAV particle of embodiment 35 or 36, wherein [N3] comprises AQ, SQ, AK, DQ, PQ, QA, QP, or KA.
[0462] 38. The isolated AAV particle of any one of embodiments 35-37, wherein [N3] comprises AQA, AQP, SQA, AKA, DQA, QAQ, QPQ, or KAQ.
[0463] 39. The isolated AAV particle of any one of embodiments 35-38, wherein [N3] is or comprises AQAQ (SEQ ID NO: 4737), SQAQ (SEQ ID NO: 4738), AQPQ (SEQ ID NO: 4739), AQSQ (SEQ ID NO: 4740), AKAQ (SEQ ID NO: 4741), AHAQ (SEQ ID NO: 4742), AQAP (SEQ ID NO: 4743), DQAQ (SEQ ID NO: 4744), APAQ (SEQ ID NO: 4745), AQAK (SEQ ID NO: 4746), AQAH (SEQ ID NO: 4747), AQEQ (SEQ ID NO: 4748), ALAQ (SEQ ID NO: 4749), ARAQ (SEQ ID NO: 4750), or TQAQ (SEQ ID NO: 4751).
[0464] 40. The isolated AAV particle of any one of embodiments 21 or 35-39, wherein [N3] is or comprises AQAQ (SEQ ID NO: 4737), AQPQ (SEQ ID NO: 4739), SQAQ (SEQ ID NO: 4738), AKAQ (SEQ ID NO: 4741), or DQAQ (SEQ ID NO: 4744).
[0465] 41. The isolated AAV particle of any one of embodiments 21 or 35-40, wherein [N3] is or comprises AQAQ (SEQ ID NO: 4737).
[0466] 42. The isolated AAV article of an one of embodiments 21 or 35-41, wherein [N2]-[N3] comprises:

(SEQ ID NO: 4797)
(i) VHLYAQAQ,
(SEQ ID NO: 4798)
VHLYAQPQ,
(SEQ ID NO: 4799)
VHLYSQAQ,
(SEQ ID NO: 4800)
VHLYAKAQ,
(SEQ ID NO: 4801)
VHLYDQAQ,
(SEQ ID NO: 4802)
VHIYAQAQ,
(SEQ ID NO: 4803)
VHVYAQAQ,
(SEQ ID NO: 4804)
VHHYAQAQ;

[0467] (ii) an amino acid sequence comprising any portion of an amino acid sequence in (i), e.g., any 2, 3, 4, 5, 6, or 7 amino acids, e.g., consecutive amino acids, thereof;
[0468] (iii) an amino acid sequence comprising at least one, two, or three but no more than four modifications, e.g., substitutions (e.g., conservative substitutions), insertions, or deletions, relative to any of the amino acid sequences in (i); or
[0469] (iv) an amino acid sequence comprising at least one, two, or three but no more than four different amino acids, relative to any one of the amino acid sequences in (i).
[0470] 43. The isolated AAV particle of any one of embodiments 21 or 35-42, wherein [N2]-[N3] is or comprises VHLYAQAQ (SEQ ID NO: 4797).
[0471] 44. The isolated AAV particle of any one of embodiments 35-43, wherein [N1]-[N2]-[N3] comprises:

(SEQ ID NO: 4805)
(i) ALDGAVHLYAQ,
(SEQ ID NO: 4806)
ALNGAVHLYAQ,
(SEQ ID NO: 4807)
PINGAVHLYAQ,
(SEQ ID NO: 4808)
PLDGAVHLYAQ,
(SEQ ID NO: 4809)
PLDGAVHLYSQ,
(SEQ ID NO: 4810)
PLDSAVHLYAQ,
(SEQ ID NO: 4811)
PLDSSVHLYAQ,
(SEQ ID NO: 4812)
PLNGAVHLYAK,
(SEQ ID NO: 4813)
PLNGAVHLYAQ,
(SEQ ID NO: 4814)
PLNGAVHLYDQ,
(SEQ ID NO: 4815)
PLNGAVHLYSQ,
(SEQ ID NO: 4816)
PLNGGVHLYAQ,
(SEQ ID NO: 4817)
PLNGNVHLYAQ,
(SEQ ID NO: 4818)
PLNGSVHLYAQ,
(SEQ ID NO: 4819)
PLNGTVHLYAQ,
(SEQ ID NO: 4820)
QLNGAVHLYAQ,
(SEQ ID NO: 4821)
SLDGAVHLYAQ,
(SEQ ID NO: 4822)
SLNGAVHLYAQ,
(SEQ ID NO: 4823)
TLNGAVHLYAQ,
(SEQ ID NO: 4824)
PLNGAVHIYAQ,
(SEQ ID NO: 4825)
PLDGAVHVYAQ,
or
(SEQ ID NO: 4826)
PLNGAVHHYAQ;

[0472] (ii) an amino acid sequence comprising any portion of an amino acid sequence in (i), e.g., any 2, 3, 4, 5, 6, 7, 8, 9, or 10 amino acids, e.g., consecutive amino acids, thereof;
[0473] (iii) an amino acid sequence comprising at least one, two, or three but no more than four modifications, e.g., substitutions (e.g., conservative substitutions), insertions, or deletions, relative to any of the amino acid sequences in (i); or
[0474] (iv) an amino acid sequence comprising at least one, two, or three but no more than four different amino acids, relative to any one of the amino acid sequences in (i).
[0475] 45. The isolated AAV particle of any one of embodiments 21 or 35-44, wherein [N1]-[N2]-[N3] is or comprises:

(SEQ ID NO: 4836)
(i) PLNGAVHLYAQAQ,
(SEQ ID NO: 4827)
ALDGAVHLYAQAQ,
(SEQ ID NO: 4828)
ALNGAVHLYAQAQ,
(SEQ ID NO: 4829)
PINGAVHLYAQAQ,
(SEQ ID NO: 4830)
PLDGAVHLYAQAQ,
(SEQ ID NO: 4831)
PLDGAVHLYAQPQ,
(SEQ ID NO: 4832)
PLDGAVHLYSQAQ,
(SEQ ID NO: 4833)
PLDSAVHLYAQAQ,
(SEQ ID NO: 4834)
PLDSSVHLYAQAQ,
(SEQ ID NO: 4835)
PLNGAVHLYAKAQ,
(SEQ ID NO: 4837)
PLNGAVHLYAQPQ,
(SEQ ID NO: 4838)
PLNGAVHLYDQAQ,
(SEQ ID NO: 4839)
PLNGAVHLYSQAQ,
(SEQ ID NO: 4840)
PLNGGVHLYAQAQ,
(SEQ ID NO: 4841)
PLNGNVHLYAQAQ,
(SEQ ID NO: 4842)
PLNGSVHLYAQAQ,
(SEQ ID NO: 4843)
PLNGTVHLYAQAQ,
(SEQ ID NO: 4844)
QLNGAVHLYAQAQ,
(SEQ ID NO: 4845)
SLDGAVHLYAQAQ,
(SEQ ID NO: 4846)
SLNGAVHLYAQAQ,
(SEQ ID NO: 4847)
TLNGAVHLYAQAQ,
(SEQ ID NO: 4848)
PLNGAVHIYAQAQ,
(SEQ ID NO: 4849)
PLDGAVHVYAQAQ,
or
(SEQ ID NO: 4850)
PLNGAVHHYAQAQ;

[0476] (ii) an amino acid sequence comprising any portion of an amino acid sequence in (i), e.g., any 2, 3, 4, 5, 6, 7, 8, 9, 10, 11, or 12 amino acids, e.g., consecutive amino acids, thereof;
[0477] (iii) an amino acid sequence comprising at least one, two, or three but no more than four modifications, e.g., substitutions (e.g., conservative substitutions), insertions, or deletions, relative to any of the amino acid sequences in (i); or
[0478] (iv) an amino acid sequence comprising at least one, two, or three but no more than four different amino acids, relative to any one of the amino acid sequences in (i).
[0479] 46. The isolated AAV particle of any one of embodiments 21 or 35-45, wherein [N1]-[N2]-[N3] is or comprises PLNGAVHLYAQAQ (SEQ ID NO: 4836).
[0480] 47. The isolated AAV particle of any one of embodiments 20-46, wherein the AAV capsid variant further comprises one, two, or all of an amino acid other than T at position 593 (e.g., V, L, R, S, A, C, I, K, M, N, P, or Q), an amino acid other than G at position 594 (e.g., S, A, T, M, V, Q, L, H, I, K, N, P, R, or Y), and/or an amino acid other than W at position 595 (e.g., S, P, G, A, Q, L, M, K, C, E, F, H, R, T, V, or Y), relative to a reference sequence numbered according to the amino acid sequence of SEQ ID NO: 138.
[0481] 48. The isolated AAV particle of any one of embodiments 20-47, wherein the AAV capsid variant further comprises one, two, or all of an amino acid other than T at position 600 (e.g., V, L, R, S, A, C, I, K, M, N, P, or Q), an amino acid other than G at position 601 (e.g., S, A, T, M, V, Q, L, H, I, K, N, P, R, or Y), and/or an amino acid other than W at position 602 (e.g., S, P, G, A, Q, L, M, K, C, E, F, H, R, T, V, or Y), relative to a reference sequence numbered according to the amino acid sequence of SEQ ID NO: 5, 8, or 3636.
[0482] 49. The isolated AAV particle of any one of embodiments 20-48, wherein the AAV capsid variant further comprises one, two, or all of:
   [0483] (i) the amino acid V, L, R, S, A, C, I, K, M, N, P, or Q (e.g., L) at position 593 numbered according to SEQ ID NO: 138 or at position 600 numbered according to SEQ ID NO: 5, 8, or 3636);
   [0484] (ii) the amino acid S, A, T, M, V, Q, L, H, I, K, N, P, R, or Y (e.g., S) at position 594 numbered according to SEQ ID NO: 138, or at position 601 numbered according to SEQ ID NO: 5, 8, or 3636; and/or
   [0485] (iii) the amino acid S, P, G, A, Q, L, M, K, C, E, F, H, R, T, V, or Y (e.g. P) at position 595 numbered according to SEQ ID NO: 138 or at position 602 numbered according to SEQ ID NO: 5, 8, or 3636).
[0486] 50. The isolated AAV particle of any one of embodiments 20-49, wherein the AAV capsid variant further comprises:
   [0487] (i) the amino acid L at position 593 numbered according to SEQ ID NO: 138 or at position 600 numbered according to SEQ ID NO: 5, 8, or 3636;
   [0488] (ii) the amino acid S at position 594 numbered according to SEQ ID NO: 138, or at position 601 numbered according to SEQ ID NO: 5, 8, or 3636; and
   [0489] (iii) the amino acid P at position 595 numbered according to SEQ ID NO: 138 or at position 602 numbered according to SEQ ID NO: 5, 8, or 3636.
[0490] 51. The isolated AAV particle of any one of embodiments 20-46, wherein the AAV capsid variant further comprises:
   [0491] (i) T at position 593, G at position 594, and/or W at position 595, numbered according to SEQ ID NO: 138;
   [0492] (ii) T at position 600, G at position 601, and/or W at position 602, numbered according to SEQ ID NO: 5, 8, or 3636.
[0493] 52. The isolated AAV particle of any one of embodiments 20 or 22-51, wherein the AAV capsid variant further comprises [N4], wherein [N4] comprises X10, X11, and X12, wherein:
   [0494] (a) position X10 is: T, V, L, R, S, A, C, I, K, M, N, P, or Q;
   [0495] (b) position X11 is: G, S, A, T, M, V, Q, L, H, I, K, N, P, R, or Y; and
   [0496] (c) position X12 is: W, S, P, G, A, Q, L, M, K, C, E, F, H, R, T, V, or Y; and/or an amino acid modification, e.g., a conservative substitution, of any of the aforesaid amino acids in (a)-(c).
[0497] 53. The isolated AAV particle of embodiment 52, wherein:
   [0498] (a) position X10 is: T, V, L, A, R, C, S, I, M, N, P, Q;
   [0499] (b) position X11 is: G, A, S, T, M, Q, V; and/or
   [0500] (c) position X12 is: P, S, W, G, A, Q, T, K, N, R, L, M, H, V, C, or E.
[0501] 54. The isolated AAV particle of any one of embodiments 52 or 53, wherein [N4] comprises LS, TG, LA, LT, SA, SS, TL, TT, TS, TA, TV, VS, AA, AG, AS, AT, CS, CT, IA, IG, IL, IQ, IS, IT, LG, LH, LK, LM, LN, LQ, MA, NA, NM, NS, NT, NV, QA, RA, RG, RI, RL, RM, RN, RQ, RS, RT, RV, SG, SM, ST, SV, TK, TM, TN, TP, TQ, TR, VA, VG, VH, VK, VL, VM, VN, VQ, VR, VT, PG, LV, SP, GW, AP, GR, AL, AW, GG, GS, GP, QP, QS, AH, AN, AQ, AR, GQ, HP, KS, MG, MP, MQ, MS, NP, QQ, QR, SH, SK, SQ, SR, IP, VE, AK, AM, AV, GA, GC, GT, KA, KP, KQ, LP, MK, MN, MT, NQ, PP, QH, QK, QM, QN, QT, RW, SL, VW, GK, GN, NG, RP, SN, GL, or VP.
[0502] 55. The isolated AAV particle of any one of embodiments 21 or 52-54, wherein [N4] is or comprises TGW, TGL, TGS, TGG, TAW, TGR, TAS, LSS, TSS, SSL, SSS, TLS, TVS, VSS, TSP, VSP, TMS, LSP, VAS, TAL, TTS, TLP, VLP, RGW, LSG, LAS, SSP, LLP, STS, TSA, TTP, SAL, LGS, VTP, VSA, IGW, TGF, LTP, TLA, LSA, TVG, TAP, TMP, TSL, VQS, SSM, SLP, VSQ, RSS, TST, VMS, TTA, TQP, LST, LAP, TVA, RLS, TGY, TSG, TAG, VMP, TSQ, TMA, VGS, TSW, TGV, TGT, TLG, LMP, VQP, TGM, SMS, SQL, IGS, RSV, TAA, STP, LSQ, TAQ, TGP, ASP, VSG, SAP, TLQ, LQP, TAT, TGQ, ATS, IGG, VAA, TSM, TVW, TAM, TGA, VAT, QSP, TQA, VQA, RSP, LAT, VAQ, LAA, RST, RTL, LGT, LMS, LGP, RTS, SQP, VLG, SVS, TMQ, SAV, LAG, SGP, TNS, RLT, TTQ, SAA, TSV, RLG, RAS, STQ, CSP, SAG, ALP, VTS, ISP, SVG, LTS, TTT, RSG, TQL, LNP, TVQ, IAS, LAQ, LSR, LSN, TTG, TSN, SMA, TKS, SVA, TQQ, VQQ, RLP, SAM, TAV, TQW, SSR, TQT, VNS, RSA, LMG, RQS, LVG, VTA, RTT, SMG, VMA, TKP, SAQ, NSP, ATP, VAG, RGS, VKP, RMS, NLP, NAL, RTP, RQL, VQG, VTG, VST, NAS, RVE, ATG, AMS, RNS, VMQ, SMQ, LQQ, TMG, LGQ, TSH, AAP, RSQ, TYS, ITP, VAK, TQM, TKA, SQQ, ISG, VSR, RTA, RML, SQM, VAN, CTP, ISS, AGP, TAK, RTG, LHP, TMT, AQP, QAP, RQP, LKS, NTT, TSK, RYS, KSS, NTP, VGG, IAA, LMA, MAP, VHP, VLS, LAN, ATQ, TNA, TAN, VSN, AAA, AVG, LTA, SAN, RAG, RQG, TLR, LSH, SAF, RAA, IQP, ILG, VNG, SVQ, LSK, TNG, RTQ, TMN, RGG, TTR, VRP, VKA, LAR, NQP, TMK, TYA, TQK, TTK, IAG, TQN, LAH, NTQ, RQQ, RAQ, TKQ, TQH, TNQ, LMQ, VNA, VQT, TQR, VGK, VKQ, IQS, LQR, TMM, VGN, RIG, SAK, RIA, VQN, NVQ, RIP, NAQ, NMQ, TPS, LTN, VTK, PGW, LPP, SPP, TPA, TGC, VPP, TPT, TPW, TPP, RPP, TPQ, TPR, TPG, VPA, VPQ, RPG, KGW, TRW, TAR, IPP, RSL, LVP, KGS, VAP, KGG, KAW, PGS, TRL, or AGW.
[0503] 56. The isolated AAV particle of any one of embodiments 21 or 52-55, wherein [N4] is or comprises LSP, TGW, LAA, LTP, SAP, SSP, TGR, TLA, TTS, TSP, TAL, TAW, TGG, TGS, TVS, VSP, VSS, AAP AGP, ASP, ATP, CSP, CTP, IAA, IAG, IAS, IGG, IGS, ILG, IQP, IQS, ISG, ISP, ISS, ITP, LAG, LAH, LAN, LAP, LAQ, LAR, LAS, LAT, LGP, LGQ, LGS, LHP, LKS, LMA, LMG, LMP, LMQ, LMS, LNP, LQP, LQQ, LQR, LSH, LSK, LSQ, LSR, LST, LTA, LTN, LTS, MAP, NAQ, NAS, NMQ, NSP, NTP, NVQ, QAP, RAA, RAQ, RAS, RGG, RGS, RIA, RIG, RIP, RLG, RLS, RMS, RNS, RQP, RSA, RSG, RSP, RSQ, RSS, RST, RTA, RTG, RTL, RTS, RTT, RVE, SAA, SAK, SAM, SAQ, SGP, SMA, SMG, SMQ, SMS, STP, SVA, SVG, TAA, TAG, TAK, TAM, TAN, TAP, TAQ, TAS, TAT, TAV, TGA, TGC, TGP, TGT, TKA, TKP, TKQ, TKS, TLP, TLQ, TMA, TMG, TMK, TMN, TMP, TMQ, TMS, TMT, TNA, TNQ, TNS, TPP, TQH, TQK, TQM, TQN, TQP, TQQ, TQT, TRW, TSA, TSG, TSH, TSK, TSL, TSM, TSQ, TSS, TST, TSV, TTA, TTG, TTK, TTP, TTQ, TTT, TVA, TVG, TVQ, TVW, VAA, VAG, VAK, VAN, VAQ, VAS, VAT, VGG, VGK, VGN, VGS, VHP, VKA, VKP, VKQ, VLP, VLS, VMA, VMQ, VMS, VNA, VNG, VNS, VQA, VQN, VQP, VQQ, VQS, VQT, VRP, VSA, VSG, VSN, VSQ, VSR, VST, VTA, VTG, VTK, VTP, VTS, TGL, PGW, LSG, LSS, or LVP.
[0504] 57. The isolated AAV particle of any one of embodiments 21 or 52-57, wherein [N4] is or comprises TGW.
[0505] 58. The isolated AAV particle of any one of embodiments 21 or 52-57, wherein [N4] is or comprises LSP.
[0506] 59. The isolated AAV particle of any one of embodiments 20-58, wherein the AAV capsid variant further comprises one, two, or all of an amino acid other than V at position 596 (e.g., D, F, G, L, A, E, or I), an amino acid other than Q at position 597 (e.g., K, R, H, E, L, or P), and/or an amino acid other than N at position 598 (e.g., T, K, H, D, Y, S, I, or P), relative to a reference sequence numbered according to the amino acid sequence of SEQ ID NO: 138.
[0507] 60. The isolated AAV particle of any one of embodiments 20-59, wherein the AAV capsid variant further comprises one, two, or all of an amino acid other than V at position 603 (e.g., D, F, G, L, A, E, or I), an amino acid other than Q at position 604 (e.g., K, R, H, E, L, or P), and/or an amino acid other than N at position 605 (e.g., T, K, H, D, Y, S, I, or P), relative to a reference sequence numbered according to the amino acid sequence of SEQ ID NO: 5, 8, or 3636.
[0508] 61. The isolated AAV particle of any one of embodiments 20-60, wherein the AAV capsid variant further comprises one, two, or all of:
   [0509] (i) the amino acid V, D, F, G, L, A, E, or I at position 596 numbered according to SEQ ID NO: 138 or at position 603 numbered according to SEQ ID NO: 5, 8, or 3636;
   [0510] (ii) the amino acid K, R, H, E, L, or P at position 597 numbered according to SEQ ID NO: 138 or at position 604 numbered according to SEQ ID NO: 5, 8, or 3636; and/or
   [0511] (iii) the amino acid N, T, K, H, D, Y, S, I, or P at position 598 numbered according to the amino acid sequence of SEQ ID NO: 138 or at position 605 numbered according to SEQ ID NO: 5, 8, or 3636.
[0512] 62. The isolated AAV particle of any one of embodiments 20-61, wherein the AAV capsid variant further comprises one, two, or all of:
   [0513] (i) the amino acid V at position 596 numbered according to SEQ ID NO: 138 or at position 603 numbered according to SEQ ID NO: 5, 8, or 3636;
   [0514] (ii) the amino acid K, P, E or H at position 597 numbered according to SEQ ID NO: 138 or at position 604 numbered according to SEQ ID NO: 5, 8, or 3636; and
   [0515] (iii) the amino acid N at position 598 numbered according to the amino acid sequence of SEQ ID NO: 138 or at position 605 numbered according to SEQ ID NO: 5, 8, or 3636.
[0516] 63. The isolated AAV particle of any one of embodiments 20 or 22-62, wherein the AAV capsid variant further comprises [N5], wherein [N5] comprises X13, X14, and X15, wherein:
   [0517] (a) position X13 is: V, D, F, G, L, A, E, or I;
   [0518] (b) position X14 is: Q, K, R, H, E, L, or P; and
   [0519] (c) position X15 is: N, T, K, H, D, Y, S, I, or P; and/or an amino acid modification, e.g., a conservative substitution, of any of the aforesaid amino acids in (a)-(c).
[0520] 64. The isolated AAV particle of embodiment 63, wherein:
   [0521] (a) position X13 is: V, D, A, F, E, G, or L;
   [0522] (b) position X14 is: Q, K, R, L, or P; and/or
   [0523] (c) position X15 is: N, T, K, H, D, I, K, S, or P.
[0524] 65. The isolated AAV particle of embodiment 63 or 64, wherein position X14 is P.
[0525] 66. The isolated AAV particle of embodiment 63 or 64, wherein position X14 is K.
[0526] 67. The isolated AAV particle of embodiment 63 or 64, wherein position X14 is E or H.
[0527] 68. The isolated AAV particle of embodiment 47 or 48, wherein position X14 is Q.
[0528] 69. The isolated AAV particle of any one of embodiments 63-68, wherein [N5] comprises VQ, AQ, DQ, FQ, VL, LQ, EQ, GQ, VP, VR, VK, QN, QS, QT, QK, QH, LN, QI, PN, QD, QP, RN, or KN.
[0529] 70. The isolated AAV particle of any one of embodiments 21 or 63-69, wherein [N5] is or comprises VQN, VKN, VQT, VQK, DQN, VQH, GQN, VQI, VHN, FQN, LQN, VLN, VRN, VQS, VQY, AQN, VEN, VQD, VPN, IQN, VKK, DKN, VKT, VQP, EQN, GQT, FQK, GHN, or VPH.
[0530] 71. The isolated AAV particle of any one of embodiments 21 or 63-70, wherein [N5] is or comprises VQN, AQN, VQS, DQN, VQT, VQK, VQH, FQN, VLN, LQN, VQI, EQN, GQT, VPN, VQD, VQP, VRN, or VKN.
[0531] 72. The isolated AAV particle of any one of embodiments 21 or 63-71, wherein [N5] is or comprises VKN, VPN, VEN, or VHN.
[0532] 73. The isolated AAV particle of any one of embodiments 21 or 63-71, wherein [N5] is or comprises VQN.
[0533] 74. The isolated AAV particle of any one of embodiments 21 or 63-73, wherein [N4]-[N5] is or comprises:

(SEQ ID NO: 4851)
(i) TGWVQN,
(SEQ ID NO: 4852)
LAAVQN,
(SEQ ID NO: 4853)
LTPVQN,
(SEQ ID NO: 4854)
SAPVQN,
(SEQ ID NO: 4855)
SSPVQN,
(SEQ ID NO: 4856)
TGRVQN,
(SEQ ID NO: 4857)
TGWAQN,
(SEQ ID NO: 4858)
TGWVQS,
(SEQ ID NO: 4859)
TLAVQN,
(SEQ ID NO: 4860)
TTSVQN,
(SEQ ID NO: 4861)
TSPVQN,
(SEQ ID NO: 4862)
TALVQN,
(SEQ ID NO: 4863)
TAWVQN,
(SEQ ID NO: 4864)
TGGVQN,
(SEQ ID NO: 4865)
TGSVQN,
(SEQ ID NO: 4866)
TGWDQN,
(SEQ ID NO: 4867)
TVSVQN,
(SEQ ID NO: 4868)
VSPVQN,
(SEQ ID NO: 4869)
VSSVQN,
(SEQ ID NO: 4870)
AAPVQN,
(SEQ ID NO: 4871)
AGPVQN,
(SEQ ID NO: 4872)
ASPVQN,
(SEQ ID NO: 4873)
ATPVQN,
(SEQ ID NO: 4874)
CSPVQN,
(SEQ ID NO: 4875)
CTPVQN,
(SEQ ID NO: 4876)
IAAVQN,
(SEQ ID NO: 4877)
IAGVQN,
(SEQ ID NO: 4878)
IASVQN,
(SEQ ID NO: 4879)
IGGVQN,
(SEQ ID NO: 4880)
IGSVQN,
(SEQ ID NO: 4881)
ILGVQN,
(SEQ ID NO: 4882)
IQPVQN,
(SEQ ID NO: 4883)
IQSVQN,
(SEQ ID NO: 4884)
ISGVQN,
(SEQ ID NO: 4885)
ISPVQN,
(SEQ ID NO: 4886)
ISSVQN,
(SEQ ID NO: 4887)
ITPVQN,
(SEQ ID NO: 4888)
LAGVQN,
(SEQ ID NO: 4889)
LAHVQN,
(SEQ ID NO: 4890)
LANVQN,
(SEQ ID NO: 4891)
LAPVQN,
(SEQ ID NO: 4892)
LAPVQT,
(SEQ ID NO: 4893)
LAQVQN,
(SEQ ID NO: 4894)
LARVQN,
(SEQ ID NO: 4895)
LASVQN,
(SEQ ID NO: 4896)
LATVQN,
(SEQ ID NO: 4897)
LGPVQN,
(SEQ ID NO: 4898)
LGQVQN,
(SEQ ID NO: 4899)
LGSVQN,
(SEQ ID NO: 4900)
LHPVQN,
(SEQ ID NO: 4901)
LKSVQN,
(SEQ ID NO: 4902)
LMAVQN,
(SEQ ID NO: 4903)
LMGVQN,
(SEQ ID NO: 4904)
LMPVQN,
(SEQ ID NO: 4905)
LMQVQN,
(SEQ ID NO: 4906)
LMSVQN,
(SEQ ID NO: 4907)
LNPVQN,
(SEQ ID NO: 4908)
LQPVQN,
(SEQ ID NO: 4909)
LQQVQN,
(SEQ ID NO: 4910)
LQRVQN,
(SEQ ID NO: 4911)
LSHVQN,
(SEQ ID NO: 4912)
LSKVQN,
(SEQ ID NO: 4913)
LSPVQK,
(SEQ ID NO: 4914)
LSPVQN,
(SEQ ID NO: 4915)
LSQVQN,
(SEQ ID NO: 4916)
LSRVQN,
(SEQ ID NO: 4917)
LSTVQN,
(SEQ ID NO: 4918)
LTAVQN,
(SEQ ID NO: 4919)
LTNVQN,
(SEQ ID NO: 4920)
LTSVQN,
(SEQ ID NO: 4921)
MAPVQN,
(SEQ ID NO: 4922)
NAQVQN,
(SEQ ID NO: 4923)
NASVQN,
(SEQ ID NO: 4924)
NMQVQN,
(SEQ ID NO: 4925)
NSPVQN,
(SEQ ID NO: 4926)
NTPVQN,
(SEQ ID NO: 4927)
NVQVQN,
(SEQ ID NO: 4928)
QAPVQN,
(SEQ ID NO: 4929)
RAAVQN,
(SEQ ID NO: 4930)
RAQVQN,
(SEQ ID NO: 4931)
RASVQN,
(SEQ ID NO: 4932)
RGGVQN,
(SEQ ID NO: 4933)
RGSVQN,
(SEQ ID NO: 4934)
RIAVQN,
(SEQ ID NO: 4935)
RIGVQN,
(SEQ ID NO: 4936)
RIPVQN,
(SEQ ID NO: 4937)
RLGVQN,
(SEQ ID NO: 4938)
RLSVQN,
(SEQ ID NO: 4939)
RMSVQN,
(SEQ ID NO: 4940)
RNSVQN,
(SEQ ID NO: 4941)
RQPVQN,
(SEQ ID NO: 4942)
RSAVQN,
(SEQ ID NO: 4943)
RSGVQN,
(SEQ ID NO: 4944)
RSPVQN,
(SEQ ID NO: 4945)
RSQVQN,
(SEQ ID NO: 4946)
RSSVQN,
(SEQ ID NO: 4947)
RSTVQN,
(SEQ ID NO: 4948)
RTAVQN,
(SEQ ID NO: 4949)
RTGVQN,
(SEQ ID NO: 4950)
RTLVQN,
(SEQ ID NO: 4951)
RTSVQN,
(SEQ ID NO: 4952)
RTTVQN,
(SEQ ID NO: 4953)
RVEVQN,
(SEQ ID NO: 4954)
SAAVQN,
(SEQ ID NO: 4955)
SAKVQN,
(SEQ ID NO: 4956)
SAMVQN,
(SEQ ID NO: 4957)
SAQVQN,
(SEQ ID NO: 4958)
SGPVQN,
(SEQ ID NO: 4959)
SMAVQN,
(SEQ ID NO: 4960)
SMGVQN,
(SEQ ID NO: 4961)
SMQVQN,
(SEQ ID NO: 4962)
SMSVQN,
(SEQ ID NO: 4963)
STPVQN,
(SEQ ID NO: 4964)
SVAVQN,
(SEQ ID NO: 4965)
SVGVQN,
(SEQ ID NO: 4966)
TAAVQN,
(SEQ ID NO: 4967)
TAGVQN,
(SEQ ID NO: 4968)
TAKVQN,
(SEQ ID NO: 4969)
TAMVQN,
(SEQ ID NO: 4970)
TANVQN,
(SEQ ID NO: 4971)
TAPVQN,
(SEQ ID NO: 4972)
TAPVQT,
(SEQ ID NO: 4973)
TAQVQN,
(SEQ ID NO: 4974)
TASVQN,
(SEQ ID NO: 4975)
TASVQT,
(SEQ ID NO: 4976)
TATVQN,
(SEQ ID NO: 4977)
TAVVQN,
(SEQ ID NO: 4978)
TAWDQN,
(SEQ ID NO: 4979)
TAWVQH,
(SEQ ID NO: 4980)
TAWVQT,
(SEQ ID NO: 4981)
TGAVQN,
(SEQ ID NO: 4982)
TGCFQN,
(SEQ ID NO: 4983)
TGGAQN,
(SEQ ID NO: 4984)
TGGFQN,
(SEQ ID NO: 4985)
TGGVLN,
(SEQ ID NO: 4986)
TGGVQH,
(SEQ ID NO: 4987)
TGGVQK,
(SEQ ID NO: 4988)
TGGVQT,
(SEQ ID NO: 4989)
TGPVQN,
(SEQ ID NO: 4990)
TGSAQN,
(SEQ ID NO: 4991)
TGSLQN,
(SEQ ID NO: 4992)
TGSVQH,
(SEQ ID NO: 4993)
TGSVQI,
(SEQ ID NO: 4994)
TGSVQS,
(SEQ ID NO: 4995)
TGSVQT,
(SEQ ID NO: 4996)
TGTVQN,
(SEQ ID NO: 4997)
TGWEQN,
(SEQ ID NO: 4998)
TGWFQN,
(SEQ ID NO: 4999)
TGWGQT,
(SEQ ID NO: 5000)
TGWVPN,
(SEQ ID NO: 5001)
TGWVQD,
(SEQ ID NO: 5002)
TGWVQP,
(SEQ ID NO: 5003)
TGWVQT,
(SEQ ID NO: 5004)
TGWVRN,
(SEQ ID NO: 5005)
TKAVQN,
(SEQ ID NO: 5006)
TKPVQN,
(SEQ ID NO: 5007)
TKQVQN,
(SEQ ID NO: 5008)
TKSVQN,
(SEQ ID NO: 5009)
TLPVQN,
(SEQ ID NO: 5010)
TLQVQN,
(SEQ ID NO: 5011)
TMAVQN,
(SEQ ID NO: 5012)
TMGVQN,
(SEQ ID NO: 5013)
TMKVQN,
(SEQ ID NO: 5014)
TMNVQN,
(SEQ ID NO: 5015)
TMPVQN,
(SEQ ID NO: 5016)
TMQVQN,
(SEQ ID NO: 5017)
TMSVKN,
(SEQ ID NO: 5018)
TMSVQN,
(SEQ ID NO: 5019)
TMSVQT,
(SEQ ID NO: 5020)
TMTVQN,
(SEQ ID NO: 5021)
TNAVQN,
(SEQ ID NO: 5022)
TNQVQN,
(SEQ ID NO: 5023)
TNSVQN,
(SEQ ID NO: 5024)
TPPVQN,
(SEQ ID NO: 5025)
TQHVQN,
(SEQ ID NO: 5026)
TQKVQN,
(SEQ ID NO: 5027)
TQMVQN,
(SEQ ID NO: 5028)
TQNVQN,
(SEQ ID NO: 5029)
TQPVQN,
(SEQ ID NO: 5030)
TQQVQN,
(SEQ ID NO: 5031)
TQTVQN,
(SEQ ID NO: 5032)
TRWDQN,
(SEQ ID NO: 5033)
TSAVQN,
(SEQ ID NO: 5034)
TSGVQN,
(SEQ ID NO: 5035)
TSHVQN,
(SEQ ID NO: 5036)
TSKVQN,
(SEQ ID NO: 5037)
TSLVQN,
(SEQ ID NO: 5038)
TSMVQN,
(SEQ ID NO: 5039)
TSPDQN,
(SEQ ID NO: 5040)
TSQVQN,
(SEQ ID NO: 5041)
TSSVQN,
(SEQ ID NO: 5042)
TSSVQT,
(SEQ ID NO: 5043)
TSTVQN,
(SEQ ID NO: 5044)
TSVVQN,
(SEQ ID NO: 5045)
TTAVQN,
(SEQ ID NO: 5046)
TTGVQN,
(SEQ ID NO: 5047)
TTKVQN,
(SEQ ID NO: 5048)
TTPVQN,
(SEQ ID NO: 5049)
TTPVQT,
(SEQ ID NO: 5050)
TTQVQN,
(SEQ ID NO: 5051)
TTTVQN,
(SEQ ID NO: 5052)
TVAVQN,
(SEQ ID NO: 5053)
TVAVQT,
(SEQ ID NO: 5054)
TVGVQN,
(SEQ ID NO: 5055)
TVQVQN,
(SEQ ID NO: 5056)
TVSVKN,
(SEQ ID NO: 5057)
TVWVQK,
(SEQ ID NO: 5058)
VAAVQN,
(SEQ ID NO: 5059)
VAGVQN,
(SEQ ID NO: 5060)
VAKVQN,
(SEQ ID NO: 5061)
VANVQN,
(SEQ ID NO: 5062)
VAQVQN,
(SEQ ID NO: 5063)
VASVQN,
(SEQ ID NO: 5064)
VATVQN,
(SEQ ID NO: 5065)
VGGVQN,
(SEQ ID NO: 5066)
VGKVQN,
(SEQ ID NO: 5067)
VGNVQN,
(SEQ ID NO: 5068)
VGSVQN,
(SEQ ID NO: 5069)
VHPVQN,
(SEQ ID NO: 5070)
VKAVQN,
(SEQ ID NO: 5071)
VKPVQN,
(SEQ ID NO: 5072)
VKQVQN
(SEQ ID NO: 5073)
VLPVQN,
(SEQ ID NO: 5074)
VLSVQN,
(SEQ ID NO: 5075)
VMAVQN,
(SEQ ID NO: 5076)
VMQVQN,
(SEQ ID NO: 5077)
VMSVQN,
(SEQ ID NO: 5078)
VNAVQN,
(SEQ ID NO: 5079)
VNGVQN,
(SEQ ID NO: 5080)
VNSVQN,
(SEQ ID NO: 5081)
VQAVQN,
(SEQ ID NO: 5082)
VQNVQN,
(SEQ ID NO: 5083)
VQPVQN,
(SEQ ID NO: 5084)
VQQVQN,
(SEQ ID NO: 5085)
VQSVQN,
(SEQ ID NO: 5086)
VQTVQN,
(SEQ ID NO: 5087)
VRPVQN,
(SEQ ID NO: 5088)
VSAVQN,
(SEQ ID NO: 5089)
VSGVQN,
(SEQ ID NO: 5090)
VSNVQN,
(SEQ ID NO: 5091)
VSPVQT,
(SEQ ID NO: 5092)
VSQVQN,
(SEQ ID NO: 5093)
VSRVQN,
(SEQ ID NO: 5094)
VSSVQK,
(SEQ ID NO: 5095)
VSSVQT,
(SEQ ID NO: 5096)
VSTVQN,
(SEQ ID NO: 5097)
VTAVQN,
(SEQ ID NO: 5098)
VTGVQN,
(SEQ ID NO: 5099)
VTKVQN,
(SEQ ID NO: 5100)
VTPVQN,
(SEQ ID NO: 5101)
VTSVQN,
(SEQ ID NO: 5102)
TGLVQN,
(SEQ ID NO: 5103)
TGWVKN,
(SEQ ID NO: 5104)
PGWVQN,
(SEQ ID NO: 5105)
TGWVQH,
(SEQ ID NO: 5106)
LSGVQN,
(SEQ ID NO: 5107)
LSSVQN,
or
(SEQ ID NO: 5108)
LVPVQN;

[0534] (ii) an amino acid sequence comprising any portion of an amino acid sequence in (i), e.g., any 2, 3, 4, or 5 amino acids, e.g., consecutive amino acids, thereof;
[0535] (iii) an amino acid sequence comprising at least one, two, or three but no more than four modifications, e.g., substitutions (e.g., conservative substitutions), insertions, or deletions, relative to any of the amino acid sequences in (i); or
[0536] (iv) an amino acid sequence comprising at least one, two, or three but no more than four different amino acids, relative to any one of the amino acid sequences in (i).
[0537] 75. The isolated AAV particle of any one of embodiments 21 or 63-74, wherein [N4]-[N5] is or comprises TGWVQN (SEQ ID NO: 4851), LSPVKN (SEQ ID NO: 5109), or TGWVPN (SEQ ID NO: 5000). 76. The isolated AAV particle of embodiment 21-75, wherein:
   [0538] (i) [N1] is or comprises: PLNGA (SEQ ID NO: 3679), QLNGA (SEQ ID NO: 4685), PLDGA (SEQ ID NO: 4691), PLDSS (SEQ ID NO: 4705), ALNGA (SEQ ID NO: 4686), PLNGS (SEQ ID NO: 4687), PLNGG (SEQ ID NO: 4689), SLNGA (SEQ ID NO: 4684), PLNGN (SEQ ID NO: 4693), PLNGT (SEQ ID NO: 4690), ALDGA (SEQ ID NO: 4698), PLDSA (SEQ ID NO: 4701), SLDGA (SEQ ID NO: 4694), TLNGA (SEQ ID NO: 4708), or PINGA (SEQ ID NO: 4697);
   [0539] (ii) [N2] is or comprises: VHLY (SEQ ID NO: 4680), VHHY (SEQ ID NO: 4683), VHVY (SEQ ID NO: 4682), or VHIY (SEQ ID NO: 4681);
   [0540] (iii) [N3] is or comprises: AQAQ (SEQ ID NO: 4737), AQPQ (SEQ ID NO: 4739), AKAQ (SEQ ID NO: 4741), DQAQ (SEQ ID NO: 4744), or SQAQ (SEQ ID NO: 4738);
   [0541] (iv) [N4] is or comprises: TGW, LSP, TMS, TTK, TGS, TTS, TSP, TMK, VAQ, TGG, TAW, VKQ, SAP, LSK, LAP, LAQ, VAS, TAK, SAK, TGC, TQK, TGR, TVA, SSP, TTQ, TAQ, RIA, RAS, TTP, LAS, LTP, STP, VSQ, TMQ, TSK, VSP, TVQ, VTA, RQP, ISG, VRP, LGP, TNQ, VQQ, VAN, AAP, RST, TMA, IQP, IAS, TVS, RGS, NSP, LQP, VTG, VMQ, SMA, VGK, IQS, CSP, LQR, TPP, VTK, AGP, LAR, TTT, TLQ, VAK, RAA, TVG, LNP, LSQ, TKP, TNA, LAT, VTP, VQA, CTP, TAG, TSQ, TMN, TST, VKP, ASP, VAA, LKS, IAA, TAA, TKA, VSN, TAP, LMP, LHP, RAQ, LTN, RTT, TSV, TLA, RMS, VGN, LMQ, TAT, VHP, ISS, TRW, TMT, RSS, PGW, RTG, VAT, VTS, VSS, TSS, TNS, VKA, SGP, TGP, TAM, TQP, TQQ, VSR, VLP, LGS, VSA, VLS, TQH, QAP, NAQ, ATP, VQP, TTA, LAA, RSG, LMA, TMP, LAN, VST, SAQ, NTP, TGL, TLP, TAV, RLG, RTL, TQM, ITP, TVW, RSA, TAS, TMG, VQS, ISP, VGG, TAL, LAG, RTA, RSP, LAH, TSL, RLS, LMG, SMQ, TQT, VGS, VSG, VMA, IGG, IAG, LSH, VQT, RNS, TKQ, LGQ, NMQ, NVQ, RGG, VMS, TTG, LSR, MAP, ILG, TGT, TSH, RIG, SAM, TSM, SMG, SMS, TSG, TGA, VNS, VAG, IGS, VNG, LSS, LTA, VQN, TKS, SVG, NAS, TSA, TAN, LTS, RSQ, RIP, LVP, RVE, SVA, LSG, LQQ, LST, SAA, RTS, TQN, VNA, or LMS; and/or (v) [N5] is or comprises: VQN, VPN, VKN, DQN, VQH, FQN, VQD, VQS, VQT, VRN, AQN, VQP, VQK, EQN, VQI, LQN, GQT, or VLN.
[0542] 77. The isolated AAV particle of embodiment 21, wherein:
   [0543] (i) [N1] is or comprises: SLNGA (SEQ ID NO: 4684), QLNGA (SEQ ID NO: 4685), ALNGA (SEQ ID NO: 4686), PLNGS (SEQ ID NO: 4687), PVNGA (SEQ ID NO: 4688), PLNGA (SEQ ID NO: 3679), PLNGG (SEQ ID NO: 4689), PLNGT (SEQ ID NO: 4690), PLDGA (SEQ ID NO: 4691), QLNGS (SEQ ID NO: 4692), PLNGN (SEQ ID NO: 4693), SLDGA (SEQ ID NO: 4694), HLNGA (SEQ ID NO: 4695), ALNGT (SEQ ID NO: 4696), PINGA (SEQ ID NO: 4697), ALDGA (SEQ ID NO: 4698), PLNCA (SEQ ID NO: 4699), PLNGQ (SEQ ID NO: 4700), PLDSA (SEQ ID NO: 4701), RLDGA (SEQ ID NO: 4702), QLNGN (SEQ ID NO: 4703), PLNGY (SEQ ID NO: 4704), or PLDSS (SEQ ID NO: 4705);
   [0544] (ii) [N2] is or comprises: VHLY (SEQ ID NO: 4680) or VHVY (SEQ ID NO: 4682);
   [0545] (iii) [N3] is or comprises: AQAQ (SEQ ID NO: 4737), SQAQ (SEQ ID NO: 4738), AQPQ (SEQ ID NO: 4739), or AQSQ (SEQ ID NO: 4740);
   [0546] (iv) [N4] is or comprises: TGW, TGL, TGS, TGG, TAW, TGR, TAS, LSS, TSS, SSL, SSS, TLS, TVS, VSS, TSP, VSP, TMS, LSP, VAS, TAL, TTS, TLP, VLP, RGW, LSG, LAS, SSP, LLP, STS, TSA, TTP, SAL, LGS, VTP, VSA, IGW, TGF, LTP, TLA, LSA, TVG, TAP, TMP, TSL, VQS, SSM, SLP, VSQ, RSS, TST, VMS, TTA, TQP, LST, LAP, TVA, RLS, TGY, TSG, TAG, VMP, TSQ, TMA, VGS, TSW, TGV, TGT, TLG, LMP, VQP, TGM, SMS, SQL, IGS, RSV, TAA, STP, LSQ, TAQ, TGP, ASP, VSG, SAP, TLQ, LQP, TAT, TGQ, ATS, IGG, VAA, TSM, TVW, TAM, TGA, VAT, QSP, TQA, VQA, RSP, LAT, VAQ, LAA, RST, RTL, LGT, LMS, LGP, RTS, SQP, VLG, SVS, TMQ, SAV, LAG, SGP, TNS, RLT, TTQ, SAA, TSV, RLG, RAS, STQ, CSP, SAG, ALP, VTS, ISP, SVG, LTS, TTT, RSG, TQL, LNP, TVQ, IAS, LAQ, LSR, LSN, TTG, TSN, SMA, TKS, SVA, TQQ, VQQ, RLP, SAM, TAV, TQW, SSR, TQT, VNS, RSA, LMG, RQS, LVG, VTA, RTT, SMG, VMA, TKP, SAQ, NSP, ATP, VAG, RGS, VKP, RMS, NLP, NAL, RTP, RQL, VQG, VTG, VST, NAS, RVE, ATG, AMS, RNS, VMQ, SMQ, LQQ, TMG, LGQ, TSH, AAP, RSQ, TYS, ITP, VAK, TQM, TKA, SQQ, ISG, VSR, RTA, RML, SQM, VAN, CTP, ISS, AGP, TAK, RTG, LHP, TMT, AQP, QAP, RQP, LKS, NTT, TSK, RYS, KSS, NTP, VGG, IAA, LMA, MAP, VHP, VLS, LAN, ATQ, TNA, TAN, VSN, AAA, AVG, LTA, SAN, RAG, RQG, TLR, LSH, SAF, RAA, IQP, ILG, VNG, SVQ, LSK, TNG, RTQ, TMN, RGG, TTR, VRP, VKA, LAR, NQP, TMK, TYA, TQK, TTK, IAG, TQN, LAH, NTQ, RQQ, RAQ, TKQ, TQH, TNQ, LMQ, VNA, VQT, TQR, VGK, VKQ, IQS, LQR, TMM, VGN, RIG, SAK, RIA, VQN, NVQ, RIP, NAQ, NMQ, TPS, LTN, VTK, PGW, LPP, SPP, TPA, or TGC; and/or
   [0547] (v) [N5] is or comprises: VQN, VKN, VQT, VQK, DQN, VQH, GQN, VQI, VHN, FQN, LQN, VLN, VRN, VQS, VQY, AQN, VEN, or VQD.
[0548] 78. The isolated AAV particle of any one of embodiments 20, 21, 32-35, 47-52, or 59-63, or 47, which comprises:
   [0549] (i) the amino acid sequence of any of SEQ ID NOs: 139-1138;
   [0550] (ii) an amino acid sequence comprising any portion of an amino acid sequence in (i), e.g., any 2, 3, 4, 5, 6, 7, 8, 9, 10, 11, 12, 13, 14, 15, 16, 17, or 18 amino acids, e.g., consecutive amino acids, thereof;
   [0551] (iii) an amino acid sequence comprising at least one, two, or three but no more than four modifications, e.g., substitutions (e.g., conservative substitutions), insertions, or deletions, relative to any of the amino acid sequences in (i); or
   [0552] (iv) an amino acid sequence comprising at least one, two, or three but no more than four different amino acids, relative to any one of the amino acid sequences in (i).
[0553] 79. The isolated AAV particle of any one of embodiments 20-76 or 78, which comprises:
   [0554] (i) the amino acid sequence of any of SEQ ID NOs: 139-476;
   [0555] (ii) an amino acid sequence comprising any portion of an amino acid sequence in (i), e.g., any 2, 3, 4, 5, 6, 7, 8, 9, 10, 11, 12, 13, 14, 15, 16, 17, or 18 amino acids, e.g., consecutive amino acids, thereof;
   [0556] (iii) an amino acid sequence comprising at least one, two, or three but no more than four modifications, e.g., substitutions (e.g., conservative substitutions), insertions, or deletions, relative to any of the amino acid sequences in (i); or
   [0557] (iv) an amino acid sequence comprising at least one, two, or three but no more than four different amino acids, relative to any one of the amino acid sequences in (i).
[0558] 80. An isolated, e.g., recombinant, AAV particle comprising an AAV capsid variant and a nucleic acid comprising a transgene encoding an antibody that binds to human tau (e.g., SEQ ID NO: 1404), wherein the AAV capsid variant comprises one, two, three, four, or all of:
   [0559] (i) an [N1], wherein [N1] is or comprises: PLNGA (SEQ ID NO: 3679), SLNGA (SEQ ID NO: 4684), QLNGA (SEQ ID NO: 4685), ALNGA (SEQ ID NO: 4686), PLNGS (SEQ ID NO: 4687), PVNGA (SEQ ID NO: 4688), PLNGG (SEQ ID NO: 4689), PLNGT (SEQ ID NO: 4690), PLDGA (SEQ ID NO: 4691), QLNGS (SEQ ID NO: 4692), PLNGN (SEQ ID NO: 4693), SLDGA (SEQ ID NO: 4694), HLNGA (SEQ ID NO: 4695), ALNGT (SEQ ID NO: 4696), PINGA (SEQ ID NO: 4697), ALDGA (SEQ ID NO: 4698), PLNCA (SEQ ID NO: 4699), PLNGQ (SEQ ID NO: 4700), PLDSA (SEQ ID NO: 4701), RLDGA (SEQ ID NO: 4702), QLNGN (SEQ ID NO: 4703), PLNGY (SEQ ID NO: 4704), or PLDSS (SEQ ID NO: 4705);
   [0560] (ii) an [N2] wherein [N2] is or comprises: VHLY (SEQ ID NO: 4680) or VHVY (SEQ ID NO: 4682);
   [0561] (iii) an [N3] wherein [N3] is or comprises: AQAQ (SEQ ID NO: 4737), SQAQ (SEQ ID NO: 4738), AQPQ (SEQ ID NO: 4739), or AQSQ (SEQ ID NO: 4740);
   [0562] (iv) an [N4] wherein [N4] is or comprises: TGW, LSP, TGL, TGS, TGG, TAW, TGR, TAS, LSS, TSS, SSL, SSS, TLS, TVS, VSS, TSP, VSP, TMS, VAS, TAL, TTS, TLP, VLP, RGW, LSG, LAS, SSP, LLP, STS, TSA, TTP, SAL, LGS, VTP, VSA, IGW, TGF, LTP, TLA, LSA, TVG, TAP, TMP, TSL, VQS, SSM, SLP, VSQ, RSS, TST, VMS, TTA, TQP, LST, LAP, TVA, RLS, TGY, TSG, TAG, VMP, TSQ, TMA, VGS, TSW, TGV, TGT, TLG, LMP, VQP, TGM, SMS, SQL, IGS, RSV, TAA, STP, LSQ, TAQ, TGP, ASP, VSG, SAP, TLQ, LQP, TAT, TGQ, ATS, IGG, VAA, TSM, TVW, TAM, TGA, VAT, QSP, TQA, VQA, RSP, LAT, VAQ, LAA, RST, RTL, LGT, LMS, LGP, RTS, SQP, VLG, SVS, TMQ, SAV, LAG, SGP, TNS, RLT, TTQ, SAA, TSV, RLG, RAS, STQ, CSP, SAG, ALP, VTS, ISP, SVG, LTS, TTT, RSG, TQL, LNP, TVQ, IAS, LAQ, LSR, LSN, TTG, TSN, SMA, TKS, SVA, TQQ, VQQ, RLP, SAM, TAV, TQW, SSR, TQT, VNS, RSA, LMG, RQS, LVG, VTA, RTT, SMG, VMA, TKP, SAQ, NSP, ATP, VAG, RGS, VKP, RMS, NLP, NAL, RTP, RQL, VQG, VTG, VST, NAS, RVE, ATG, AMS, RNS, VMQ, SMQ, LQQ, TMG, LGQ, TSH, AAP, RSQ, TYS, ITP, VAK, TQM, TKA, SQQ, ISG, VSR, RTA, RML, SQM, VAN, CTP, ISS, AGP, TAK, RTG, LHP, TMT, AQP, QAP, RQP, LKS, NTT, TSK, RYS, KSS, NTP, VGG, IAA, LMA, MAP, VHP, VLS, LAN, ATQ, TNA, TAN, VSN, AAA, AVG, LTA, SAN, RAG, RQG, TLR, LSH, SAF, RAA, IQP, ILG, VNG, SVQ, LSK, TNG, RTQ, TMN, RGG, TTR, VRP, VKA, LAR, NQP, TMK, TYA, TQK, TTK, IAG, TQN, LAH, NTQ, RQQ, RAQ, TKQ, TQH, TNQ, LMQ, VNA, VQT, TQR, VGK, VKQ, IQS, LQR, TMM, VGN, RIG, SAK, RIA, VQN, NVQ, RIP, NAQ, NMQ, TPS, LTN, VTK, PGW, LPP, SPP, TPA, or TGC; and/or
   [0563] (v) an [N5] wherein [N5] is or comprises: VQN, VKN, VQT, VQK, DQN, VQH, GQN, VQI, VHN, FQN, LQN, VLN, VRN, VQS, VQY, AQN, VEN, VQD; and/or
   [0564] wherein the AAV capsid variant comprises an amino acid modification, e.g., a conservative substitution, of any of the aforesaid amino acids in (i)-(v).
[0565] 81. The isolated AAV particle of embodiment 77 or 80, wherein the AAV capsid variant comprises:
   [0566] (i) the amino acid sequence of any of SEQ ID NOs: 140, 142-144, 148-150, 154-158, 160, 161, 163, 165, 166, 168, 170, 171, 173-175, 177-179, 181, 182, 184-197, 199-214, 218-222, 224, 225, 227-241, 243-253, 255-262, 265, 267, 268, 270, 271, 273, 274, 276, 277, 279, 282, 284-286, 288-296, 300-310, 312, 315, 317, 318, 320-323, 326, 327, 331, 332, 334, 336, 337, 339, 340, 341, 343, 344, 346, 349, 351, 352, 356-363, 365-367, 369, 370, 372-376, 378-381, 383-389, 392, 393, 395, 397-400, 404, 407, 408, 411, 412, 415, 417, 420-430, 432, 433, 435-438, 441, 442, 446-448, 451-453, 456, 458, 460, 461, 465, 467-469, 471-473, 475, 476, 478, 480, 482, 485, 488, 490, 492, 493, 495, 498, 500-503, 505, 507, 509, 510, 517, 522-526, 528, 535-538, 540, 543-545, 547, 551, 552, 557, 559, 561, 564, 568, 570, 572-574, 577, 585-588, 592-594, 596, 601, 602, 605, 612, 616, 619, 622, 624, 627, 628, 635, 640, 641, 646, 658, 660, 665, 666, 675, 678, 680, 683, 684, 689, 693, 695, 707, 711, 718, 719, 724, 727, 735, 740, 748, 751, 755, 758, 759, 765, 766, 768, 778, 783, 787, 791, 797, 801, 804, 817, 821, 832, 841, 852, 856, 861, 862, 864, 894, 906, 911, 913, 924, 929, 945, 959, 961, 970, 975, 980, 983, 988, 992, 1009, 1015, 1019, 1027, 1032, 1036, 1038, 1047, 1051, 1061, 1077, 1081, 1095, or 1113;
   [0567] (ii) an amino acid sequence comprising any portion of an amino acid sequence in (i), e.g., any 2, 3, 4, 5, 6, 7, 8, 9, 10, 11, 12, 13, 14, 15, 16, 17, or 18 amino acids, e.g., consecutive amino acids, thereof;
   [0568] (iii) an amino acid sequence comprising at least one, two, or three but no more than four modifications, e.g., substitutions (e.g., conservative substitutions), insertions, or deletions, relative to any of the amino acid sequences in (i); or
   [0569] (iv) an amino acid sequence comprising at least one, two, or three but no more than four different amino acids, relative to any one of the amino acid sequences in (i).
[0570] 82. The isolated AAV particle of any one of embodiments 21 or 63-80, wherein [N1]-[N2]-[N3]-[N4]-[N5] is or comprises the amino acid sequence of PLNGAVHLYAQAQTGWVPN (SEQ ID NO: 314).
[0571] 83. The isolated AAV particle of any one of embodiments 21 or 63-80, wherein [N1]-[N2]-[N3]-[N4]-[N5] is or comprises the amino acid sequence of PLNGAVHLYAQAQLSPVKN (SEQ ID NO: 566).
[0572] 84. The isolated AAV particle of any one of embodiments 21 or 63-81, wherein [N1]-[N2]-[N3]-[N4]-[N5] is or comprises the amino acid sequence of PLNGAVHLYAQAQTGWVQN (SEQ ID NO: 476).
[0573] 85. The isolated AAV particle of any one of embodiments 21 or 63-80, wherein [N1]-[N2]-[N3]-[N4]-[N5] is or comprises the amino acid sequence of:
   [0574] (i) the amino acid sequence of any of SEQ ID NOs: 1149-1154, 1155-1278, 314, 325, 491, 499, 529, 558, 566, 576, 603, 610, 625, 631, 648, 649, 700, 703, 720, 755, 763, 765, 771, 791, 804, 816, 818, 819, 828, 859, 864, 871, 885, 946, 960, 966, 978, 979, 1016, 1033, 1032, 1037, 1058, 1081, 1100, 1122, or 1174-1193;
   [0575] (ii) an amino acid sequence comprising any portion of an amino acid sequence in (i), e.g., any 2, 3, 4, 5, 6, 7, 8, 9, 10, 11, 12, 13, 14, 15, 16, 17, or 18 amino acids, e.g., consecutive amino acids, thereof;
   [0576] (iii) an amino acid sequence comprising at least one, two, or three but no more than four modifications, e.g., substitutions (e.g., conservative substitutions), insertions, or deletions, relative to any of the amino acid sequences in (i); or
   [0577] (iv) an amino acid sequence comprising at least one, two, or three but no more than four different amino acids, relative to any one of the amino acid sequences in (i).
[0578] 86. The isolated AAV particle of any one of embodiments 20-85, wherein [N1]-[N2] is present in loop VIII.
[0579] 87. The isolated AAV particle of any one of embodiments 21 or 63-86, wherein [N3], [N4], and/or [N5] is present in loop VIII.
[0580] 88. The isolated AAV particle of any one of embodiments 21 or 63-87, wherein [N1]-[N2]-[N3]-[N4]-[N5] is present in loop VIII.
[0581] 89. The isolated AAV particle of any one of embodiments 20-88, wherein the AAV capsid variant comprises an amino acid other than A at position 587 and/or an amino acid other than Q at position 588, numbered according to SEQ ID NO: 138.
[0582] 90. The isolated AAV particle of any one of embodiments 20-89, which comprises:
   [0583] (i) the amino acid P, Q, A, H, K, L, R, S, or T (e.g., P, Q, A, S, or T) at position 587, numbered according to SEQ ID NO: 138 or 3636; and/or
   [0584] (ii) the amino acid L, I, V, H, or R (e.g., L or I) at position 588, numbered according to SEQ ID NO: 5, 8, 138 or 3636.
[0585] 91. The isolated AAV particle of any one of embodiments 20-90, wherein [N1] is present immediately subsequent to position 586, relative to a reference sequence numbered according to the amino acid sequence of SEQ ID NO: 5, 8, 138, or 3636.
[0586] 92. The isolated AAV particle of any one of embodiments 20-91, wherein [N1] is present immediately subsequent to position 586, and replaces positions 587 and 588 (e.g., A587 and Q588), numbered according to the amino acid sequence of SEQ ID NO: 138.
[0587] 93. The isolated AAV particle of any one of embodiments 20-92, wherein [N1] replaces positions 587 and 588 (e.g., A587 and Q588), numbered according to the amino acid sequence of SEQ ID NO: 138.
[0588] 94. The isolated AAV particle of any one of embodiments 20-93, wherein [N1] corresponds to positions 587-591 of SEQ ID NO: 5, 8, or 3636.
[0589] 95. The isolated AAV particle of any one of embodiments 21 or 63-94, wherein [N1]-[N2]-[N3]-[N4]-[N5] is present immediately subsequent to position 586, numbered according to the amino acid sequence of SEQ ID NO: 5, 8, 138, or 3636.
[0590] 96. The isolated AAV particle of any one of embodiments 20-95, wherein [N2] is present immediately subsequent to [N1].
[0591] 97. The isolated AAV particle of any one of embodiments 20-96, wherein [N2] is present immediately subsequent to [N1], wherein [N1] is present immediately subsequent to position 586, relative to a reference sequence numbered according to the amino acid sequence of SEQ ID NO: 5, 8, 138, or 3636.
[0592] 98. The isolated AAV particle of any one of embodiments 20-97, wherein [N2] is present immediately subsequent to [N1], wherein [N1] is present immediately subsequent to position 586, relative to a reference sequence numbered according to the amino acid sequence of SEQ ID NO: 5, 8, 138, or 3636.
[0593] 99. The isolated AAV particle of any one of embodiments 20-98, wherein [N2] is present immediately subsequent to [N1], wherein [N1] is present immediately subsequent to position 586 and replaces positions 587 and 588 (e.g., A587 and Q588), numbered according to SEQ ID NO: 138.
[0594] 100. The isolated AAV particle of any one of embodiments 20-99, wherein [N2] corresponds to positions 592-595 of SEQ ID NO: 5, 8, or 3636.
[0595] 101. The isolated AAV particle of any one of embodiments 20-100, wherein [N1]-[N2] replaces positions 587 and 588 (e.g., A587 and Q588), numbered according to SEQ ID NO: 138.
[0596] 102. The isolated AAV particle of any one of embodiments 20-101, wherein [N1]-[N2] is present immediately subsequent to position 586, numbered according to SEQ ID NO: 138.
[0597] 103. The isolated AAV particle of any one of embodiments 20-102, wherein [N1]-[N2] is present immediately subsequent to position 586 and replaces positions 587 and 588 (e.g., A587 and Q588), numbered according to SEQ ID NO: 138.
[0598] 104. The isolated AAV particle of any one of embodiments 20-103, wherein [N1]-[N2] corresponds to positions 587-595 of SEQ ID NO: 5, 8, or 3636.
[0599] 105. The isolated AAV particle of any one of embodiments 21 or 35-104, wherein [N3] is present immediately subsequent to position 588, relative to a reference sequence numbered according to the amino acid sequence of SEQ ID NO: 138.
[0600] 106. The isolated AAV particle of any one of embodiments 21 or 35-105, wherein [N3] replaces positions 589-592 (e.g., A589, Q590, A591, Q592), numbered according to the amino acid sequence of SEQ ID NO: 138.
[0601] 107. The isolated AAV particle of any one of embodiments 21 or 35-106, wherein [N3] is present immediately subsequent to position 588, and replaces positions 589-592 (e.g., A589, Q590, A591, Q592), numbered according to the amino acid sequence of SEQ ID NO: 138.
[0602] 108. The isolated AAV particle of any one of embodiments 21 or 35-107, wherein [N3] corresponds to positions 596-599 of SEQ ID NO: 5, 8, or 3636.
[0603] 109. The isolated AAV particle of any one of embodiments 21 or 35-108, wherein [N1]-[N2]-[N3] is present immediately subsequent to position 586, numbered according to SEQ ID NO: 138.
[0604] 110. The isolated AAV particle of any one of embodiments 21 or 35-109, wherein [N1]-[N2]-[N3] replaces positions 587-592 (e.g., A587, Q588, A589, Q590, A591, Q592), numbered according to SEQ ID NO: 138.
[0605] 111. The isolated AAV particle of any one of embodiments 21 or 35-110, wherein [N1]-[N2]-[N3] is present immediately subsequent to position 586 and replaces positions 587-592 (e.g., A587, Q588, A589, Q590, A591, Q592), numbered according to SEQ ID NO: 138.
[0606] 112. The isolated AAV particle of any one of embodiments 21 or 31-111, wherein [N1]-[N2]-[N3] corresponds to positions 587-599 of SEQ ID NO: 5, 8, or 3636.
[0607] 113. The isolated AAV particle of any one of embodiments 21 or 52-112, wherein [N4] is present immediately subsequent to position 592, relative to a reference sequence numbered according to the amino acid sequence of SEQ ID NO: 138.
[0608] 114. The isolated AAV particle of any one of embodiments 21 or 52-113, wherein [N4] replaces positions 593-595 (e.g., T593, G594, W595), numbered according to the amino acid sequence of SEQ ID NO: 138.
[0609] 115. The isolated AAV particle of any one of embodiments 21 or 52-114, wherein [N4] is present immediately subsequent to position 592, and replaces positions 593-595 (e.g., T593, G594, W595), numbered according to the amino acid sequence of SEQ ID NO: 138.
[0610] 116. The isolated AAV particle of any one of embodiments 21 or 52-115, wherein [N4] corresponds to positions 600-602 of SEQ ID NO: 5, 8, or 3636.
[0611] 117. The isolated AAV particle of any one of embodiments 21 or 52-116, wherein [N3]-[N4] is present immediately subsequent to position 588, numbered according to SEQ ID NO: 138.
[0612] 118. The isolated AAV particle of any one of embodiments 21 or 52-117, wherein [N3]-[N4] replaces positions 589-595 (e.g., A589, Q590, A591, Q592, T593, G594, W595), numbered according to the amino acid sequence of SEQ ID NO: 138.
[0613] 119. The isolated AAV particle of any one of embodiments 21 or 52-118, wherein [N3]-[N4] is present immediately subsequent to 588, and replaces positions 589-595 (e.g., A589, Q590, A591, Q592, T593, G594, W595), numbered according to the amino acid sequence of SEQ ID NO: 138.
[0614] 120. The isolated AAV particle of any one of embodiments 21 or 52-119, wherein [N3]-[N4] corresponds to positions 596-602 of SEQ ID NO: 5, 8, or 3636.
[0615] 121. The isolated AAV particle of any one of embodiments 21 or 52-120, wherein [N1]-[N2]-[N3]-[N4] is present immediately subsequent to position 586, numbered according to SEQ ID NO: 138.
[0616] 122. The isolated AAV particle of any one of embodiments 21 or 52-121, wherein [N1]-[N2]-[N3]-[N4] replaces positions 587-595 (e.g., A587, Q588, A589, Q590, A591, Q592, T593, G594, W595), numbered according to SEQ ID NO: 138.
[0617] 123. The isolated AAV particle of any one of embodiments 21 or 52-122, wherein [N1]-[N2]-[N3]-[N4] is present immediately subsequent to position 586 and replaces positions 587-595 (e.g., A587, Q588, A589, Q590, A591, Q592, T593, G594, W595), numbered according to SEQ ID NO: 138.
[0618] 124. The isolated AAV particle of any one of embodiments 21 or 52-123, wherein [N1]-[N2]-[N3]-[N4] corresponds to positions 587-602 of SEQ ID NO: 5, 8, or 3636.
[0619] 125. The isolated AAV particle of any one of embodiments 21 or 63-124, wherein [N5] is present immediately subsequent to position 595, relative to a reference sequence numbered according to the amino acid sequence of SEQ ID NO: 138.
[0620] 126. The isolated AAV particle of any one of embodiments 21 or 63-125, wherein [N5] replaces positions 596-598 (e.g., V596, Q597, N598), numbered according to the amino acid sequence of SEQ ID NO: 138.
[0621] 127. The isolated AAV particle of any one of embodiments 21 or 63-126, wherein [N5] is present immediately subsequent to position 595, and replaces positions 596-598 (e.g., V596, Q597, N598), numbered according to the amino acid sequence of SEQ ID NO: 138.
[0622] 128. The isolated AAV particle of any one of embodiments 21 or 63-127, wherein [N5] corresponds to positions 603-605 of SEQ ID NO: 5, 8, or 3636.
[0623] 129. The isolated AAV particle of any one of embodiments 21 or 63-128, wherein [N4]-[N5] corresponds to positions 600-605 of SEQ ID NO: 5, 8, or 3636.
[0624] 130. The isolated AAV particle of any one of embodiments 21 or 63-129, wherein [N1]-[N2]-[N3]-[N4]-[N5] replaces positions 587-598 (e.g., A587, Q588, A589, Q590, A591, Q592, T593, G594, W595, V596, Q597, N598), numbered according to SEQ ID NO: 138.
[0625] 131. The isolated AAV particle of any one of embodiments 21 or 63-130, wherein [N1]-[N2]-[N3]-[N4]-[N5] is present immediately subsequent to position 586 and replaces positions 587-598 (e.g., A587, Q588, A589, Q590, A591, Q592, T593, G594, W595, V596, Q597, N598), numbered according to SEQ ID NO: 138.
[0626] 132. The isolated AAV particle of any one of embodiments 21 or 63-131, wherein [N1]-[N2]-[N3]-[N4]-[N5] corresponds to positions 587-605 of SEQ ID NO: 5, 8, or 3636.
[0627] 133. The isolated AAV particle of any one of embodiments 20-132, wherein the AAV capsid variant comprises from N-terminus to C-terminus, [N1]-[N2].
[0628] 134. The isolated AAV particle of any one of embodiments 21 or 35-133, wherein the AAV capsid variant comprises from N-terminus to C-terminus, [N1]-[N2]-[N3].
[0629] 135. The isolated AAV particle of any one of embodiments 21 or 52-134, wherein the AAV capsid variant comprises from N-terminus to C-terminus, [N1]-[N2]-[N3]-[N4].
[0630] 136. The isolated AAV particle of any one of embodiments 21 or 63-135, wherein the AAV capsid variant comprises from N-terminus to C-terminus, [N1]-[N2]-[N3]-[N4]-[N5].
[0631] 137. An isolated, e.g., recombinant, AAV particle comprising an AAV capsid variant and a nucleic acid comprising a transgene encoding an antibody that binds to human tau (e.g., SEQ ID NO: 1404), wherein the AAV capsid variant comprises [A][B](SEQ ID NO: 5438), wherein [A] comprises the amino acid sequence of PLNGA (SEQ ID NO: 3679), and [B] comprises X1, X2, X3, X4, wherein:
   [0632] (i) X1 is: V, I, L, A, F, D, or G;
   [0633] (ii) X2 is: H, N, Q, P, D, L, R, or Y;
   [0634] (iii) X3 is: L, H, I, R, or V; and
   [0635] (iv) X4 is Y; and/or
   [0636] wherein the AAV capsid variant comprises an amino acid modification, e.g., a conservative substitution, of any of the aforesaid amino acids in (i)-(iv);
   [0637] optionally wherein the AAV capsid variant further comprises:
   [0638] (a) one, two, or all of an amino acid other than T at position 593 (e.g., V, L, R, S, A, C, I, K, M, N, P, or Q), an amino acid other than G at position 594 (e.g., S, A, T, M, V, Q, L, H, I, K, N, P, R, or Y), and/or an amino acid other than W at position 595 (e.g., S, P, G, A, Q, L, M, K, C, E, F, H, R, T, V, or Y), relative to a reference sequence numbered according to the amino acid sequence of SEQ ID NO: 138; and/or
   [0639] (b) one, two, or all of an amino acid other than V at position 596 (e.g., D, F, G, L, A, E, or I), an amino acid other than Q at position 597 (e.g., P, K, R, H, E, or L), and/or an amino acid other than N at position 598 (e.g., T, K, H, D, Y, S, I, or P), relative to a reference sequence numbered according to the amino acid sequence of SEQ ID NO: 138;
   [0640] (c) the amino acid L, T, V, R, S, A, C, I, K, M, N, P, or Q at position 600, the amino acid S, G, A, T, M, V, Q, L, H, I, K, N, P, R, or Y at position 601, and the amino P, W, S, G, A, Q, L, M, K, C, E, F, H, R, T, V, or Y at position 602, numbered according to the amino acid sequence of SEQ ID NO: 5, 8, 3636, wherein the AAV capsid variant does not comprise the amino acid sequence TGW at position 600-602, numbered according to SEQ ID NO: 5, 8, or 3636; and/or
   [0641] (d) the amino acid V, D, F, G, L, A, E, or I at position 603, the amino acid K, P, Q, R, H, E, or L at position 604, and the amino acid N, T, K, H, D, Y, S, I, or P, numbered according to the amino acid sequence of SEQ ID NO: 5, 8, or 3636, wherein the AAV capsid variant does not comprise the amino acid sequence VQN at position 603-605, numbered according to SEQ ID NO: 5, 8, or 3636; and/or
   [0642] (e) one, two, three, four, or all of an amino acid other then P at position X1, an amino acid other than L at position X2, an amino acid other than N at position X3, an amino acid other than G at position X4, or an amino acid other than A at position X5.
[0643] 138. The isolated AAV particle of embodiment 137, wherein:
   [0644] (i) X1 is V;
   [0645] (ii) X2 is H;
   [0646] (iii) X3 is L, H, or I; and
   [0647] (iv) X4 is Y.
[0648] 139. The isolated AAV particle of embodiment 137 or 138, wherein [B] comprises:
   [0649] (i) VH, VN, VQ, IH, LH, VP, VD, AH, FH, DH, VL, GH, VR, VY, LY, HY, IY, RY, HL, HH, HI, NL, QL, PL, DL, HR, LL, RL, HV, or YL; or
   [0650] (ii) VH, LY, HY, IY, HL, HH, or HI.
[0651] 140. The isolated AAV particle of any one of embodiments 137-139, wherein [B] comprises:
   [0652] (i) VHL, VHH, VHI, VNL, VQL, IHL, LHL, VPL, VDL, AHL, VHR, FHL, DHL, VLL, GHL, VRL, VHV, VYL, HLY, HHY, HIY, NLY, QLY, PLY, DLY, HRY, LLY, RLY, HVY, YLY;
   [0653] (ii) VHL, VHH, VHI, HLY, HHY, or HIY.
[0654] 141. The isolated AAV particle of any one of embodiments 137-140, wherein [B] is:

(SEQ ID NO: 4680)
(i) VHLY,
(SEQ ID NO: 4683)
VHHY,
(SEQ ID NO: 4681)
VHIY,
(SEQ ID NO: 4724)
VNLY,
(SEQ ID NO: 4729)
VQLY,
(SEQ ID NO: 4730)
IHLY,
(SEQ ID NO: 4727)
LHLY,
(SEQ ID NO: 4723)
VPLY,
(SEQ ID NO: 4731)
VDLY,
(SEQ ID NO: 4732)
AHLY,
(SEQ ID NO: 4725)
VHRY,
(SEQ ID NO: 4726)
FHLY,
(SEQ ID NO: 4728)
DHLY,
(SEQ ID NO: 4733)
VLLY,
(SEQ ID NO: 4734)
GHLY,
(SEQ ID NO: 4735)
VRLY,
(SEQ ID NO: 4682)
VHVY,
or
(SEQ ID NO: 4736)
VYLY;
or
(SEQ ID NO: 4680)
(ii) VHLY,
(SEQ ID NO: 4683)
VHHY,
or
(SEQ ID NO: 4681)
VHIY.

[0655] 142. The isolated AAV particle of any one of embodiments 137-141, wherein [B] is or comprises VHLY (SEQ ID NO: 4680).
[0656] 143. The isolated AAV particle of any one of embodiments 137-142, wherein [A][B] comprises:

(SEQ ID NO: 3681)
(i) PLNGAVH,
(SEQ ID NO: 5110)
PLNGAVN,
(SEQ ID NO: 5111)
PLNGAVQ,
(SEQ ID NO: 5112)
PLNGAIH,
(SEQ ID NO: 5113)
PLNGALH,
(SEQ ID NO: 5114)
PLNGAVP,
(SEQ ID NO: 5115)
PLNGAVD,
(SEQ ID NO: 5116)
PLNGAAH,
(SEQ ID NO: 5117)
PLNGAFH,
(SEQ ID NO: 5118)
PLNGADH,
(SEQ ID NO: 5119)
PLNGAVL,
(SEQ ID NO: 5120)
PLNGAGH,
(SEQ ID NO: 5121)
PLNGAVR,
or
(SEQ ID NO: 5122)
PLNGAVY;
(SEQ ID NO: 3681)
(ii) PLNGAVH;

[0657] (iii) amino acid sequence comprising any portion of an amino acid sequence in (i) or (ii), e.g., any 2, 3, 4, 5, or 6 amino acids, e.g., consecutive amino acids, thereof;
[0658] (iv) an amino acid sequence comprising at least one, two, or three but no more than four modifications, e.g., substitutions (e.g., conservative substitutions), insertions, or deletions, relative to any of the amino acid sequences in (i) or (ii); or
[0659] (v) an amino acid sequence comprising at least one, two, or three but no more than four different amino acids, relative to any one of the amino acid sequences in (i) or (ii).
[0660] 144. The isolated AAV particle of any one of embodiments 137-143, wherein [A][B] is or comprises:

(SEQ ID NO: 3648)
(i) PLNGAVHLY,
(SEQ ID NO: 4796)
PLNGAVHHY,
(SEQ ID NO: 4794)
PLNGAVHIY,
(SEQ ID NO: 5123)
PLNGAVNLY,
(SEQ ID NO: 5124)
PLNGAVQLY,
(SEQ ID NO: 5125)
PLNGAIHLY,
(SEQ ID NO: 5126)
PLNGALHLY,
(SEQ ID NO: 5127)
PLNGAVPLY,
(SEQ ID NO: 5128)
PLNGAVDLY,
(SEQ ID NO: 5129)
PLNGAAHLY,
(SEQ ID NO: 5130)
PLNGAVHRY,
(SEQ ID NO: 5131)
PLNGAFHLY,
(SEQ ID NO: 5132)
PLNGADHLY,
(SEQ ID NO: 5133)
PLNGAVLLY,
(SEQ ID NO: 5134)
PLNGAGHLY,
(SEQ ID NO: 5135)
PLNGAVRLY,
(SEQ ID NO: 5136)
PLNGAVHVY,
or
(SEQ ID NO: 5137)
PLNGAVYLY;
(SEQ ID NO: 3648)
(ii) PLNGAVHLY,
(SEQ ID NO: 4796)
PLNGAVHHY,
or
(SEQ ID NO: 4794)
PLNGAVHIY;

[0661] (iii) amino acid sequence comprising any portion of an amino acid sequence in (i) or (ii), e.g., any 2, 3, 4, 5, 6, 7, or 8 amino acids, e.g., consecutive amino acids, thereof;
[0662] (iv) an amino acid sequence comprising at least one, two, or three but no more than four modifications, e.g., substitutions (e.g., conservative substitutions), insertions, or deletions, relative to any of the amino acid sequences in (i) or (ii); or
[0663] (v) an amino acid sequence comprising at least one, two, or three but no more than four different amino acids, relative to any one of the amino acid sequences in (i) or (ii).
[0664] 145. The isolated AAV particle of any one of embodiments 137-144, wherein [A][B] is or comprises PLNGAVHLY (SEQ ID NO: 3648).
[0665] 146. The isolated AAV particle of any one of embodiments 137-145, wherein the AAV capsid variant further comprises one, two, three, or all of an amino acid other than A at position 589 (e.g., D, S, or T), an amino acid other than Q at position 590 (e.g., K, H, L, P, or R), an amino acid other than A at position 591 (e.g., P or E), and/or an amino acid other than Q at position 592 (e.g., H, K, or P).
[0666] 147. The isolated AAV particle of any one of embodiments 137-146, which further comprises one, two, three, or all of an amino acid other than A at position 596 (e.g., D, S, or T), an amino acid other than Q at position 597 (e.g., K, H, L, P, or R), an amino acid other than A at position 598 (e.g., P or E), and/or an amino acid other than Q at position 599 (e.g., H, K, or P), relative to a reference sequence numbered according to the amino acid sequence of SEQ ID NO: 5, 8, or 3636.
[0667] 148. The isolated AAV particle of any one of embodiments 137-147, which further comprises:
   [0668] (i) A at position 589, Q at position 590, A at position 591, and/or Q at position 592, numbered according to the amino acid sequence of SEQ ID NO: 138; or
   [0669] (ii) A at position 596, Q at position 597, A at position 598, and/or Q at position 599, numbered according to the amino acid sequence of SEQ ID NO: 5, 8, or 3636.
[0670] 149. The isolated AAV particle of any one of embodiments 137-148, wherein the AAV capsid variant further comprises [C], wherein [C] comprises X4, X5, X6, and X7, wherein:
   [0671] (a) position X4 is: A, D, S, or T;
   [0672] (b) position X5 is: Q, K, H, L, P, or R;
   [0673] (c) position X6 is: A, P, or E; and
   [0674] (d) position X7 is: Q, H, K, or P; and/or
      an amino acid modification, e.g., a conservative substitution, of any of the aforesaid amino acids in (a)-(d).
[0675] 150. The isolated AAV particle of embodiment 149, wherein:
   [0676] (a) position X4 is: A, D, or S;
   [0677] (b) position X5 is Q or K;
   [0678] (c) position X6 is A or P; and/or
   [0679] (d) position X7 is Q.
[0680] 151. The isolated AAV particle of embodiment 149 or 150, wherein [C] comprises:
   [0681] (i) AQ, AK, DQ, SQ, AH, AL, AP, AR, TQ, PQ, EQ, QA, QP, KA, HA, QE, LA, PA, or RA; or
   [0682] (ii) AQ, AK, DQ, SQ, PQ, QA, QP, or KA.
[0683] 152. The isolated AAV particle of any one of embodiments 149-151, wherein [C] comprises:
   [0684] (i) AQA, AQP, AKA, DQA, SQA, AHA, AQE, ALA, APA, ARA, TQA, QAQ, QPQ, KAQ, HAQ, QEQ, QAK, LAQ, PAQ, RAQ, QAH, or QAP; or
   [0685] (ii) AQA, AQP, AKA, DQA, SQA, QAQ, QPQ, or KAQ.
[0686] 153. The isolated AAV particle of any one of embodiments 149-152, wherein [C] is or comprises:

(SEQ ID NO: 4737)
(i) AQAQ,
(SEQ ID NO: 4739)
AQPQ,
(SEQ ID NO: 4741)
AKAQ,
(SEQ ID NO: 4744)
DQAQ,
(SEQ ID NO: 4738)
SQAQ,
(SEQ ID NO: 4742)
AHAQ,
(SEQ ID NO: 4748)
AQEQ,
(SEQ ID NO: 4746)
AQAK,
(SEQ ID NO: 4749)
ALAQ,
(SEQ ID NO: 4745)
APAQ,
(SEQ ID NO: 4750)
ARAQ,
(SEQ ID NO: 4747)
AQAH,
(SEQ ID NO: 4743)
AQAP,
or
(SEQ ID NO: 4751)
TQAQ;
or
(SEQ ID NO: 4737)
(ii) AQAQ,
(SEQ ID NO: 4739)
AQPQ,
(SEQ ID NO: 4741)
AKAQ,
(SEQ ID NO: 4744)
DQAQ,
or
(SEQ ID NO: 4738)
SQAQ.

[0687] 154. The isolated AAV particle of any one of embodiments 149-153, wherein [C] is or comprises AQAQ (SEQ ID NO: 4737).
[0688] 155. The isolated AAV particle of any one of embodiments 149-154, wherein [B][C] is or comprises:

(SEQ ID NO: 4797)
(i) VHLYAQAQ,
(SEQ ID NO: 4804)
VHHYAQAQ,
(SEQ ID NO: 4798)
VHLYAQPQ,
(SEQ ID NO: 4800)
VHLYAKAQ,
(SEQ ID NO: 4801)
VHLYDQAQ,
(SEQ ID NO: 4799)
VHLYSQAQ,
(SEQ ID NO: 4802)
VHIYAQAQ,
(SEQ ID NO: 5138)
VHLYAHAQ,
(SEQ ID NO: 5139)
VNLYAQAQ,
(SEQ ID NO: 5140)
VQLYAQAQ,
(SEQ ID NO: 5141)
VHLYAQEQ,
(SEQ ID NO: 5142)
IHLYAQAQ,
(SEQ ID NO: 5143)
LHLYAQAQ,
(SEQ ID NO: 5144)
VPLYAQAQ,
(SEQ ID NO: 5145)
VHLYAQAK,
(SEQ ID NO: 5146)
VDLYAQAQ,
(SEQ ID NO: 5147)
AHLYAQAQ,
(SEQ ID NO: 5148)
VHRYAQAQ,
(SEQ ID NO: 5149)
FHLYAQAQ,
(SEQ ID NO: 5150)
VHLYALAQ,
(SEQ ID NO: 5151)
DHLYAQAQ,
(SEQ ID NO: 5152)
VHLYAPAQ,
(SEQ ID NO: 5153)
VHLYARAQ,
(SEQ ID NO: 5154)
VHLYAQAH,
(SEQ ID NO: 5155)
VLLYAQAQ,
(SEQ ID NO: 5156)
VHLYAQAP,
(SEQ ID NO: 5157)
GHLYAQAQ,
(SEQ ID NO: 5158)
VRLYAQAQ,
(SEQ ID NO: 4803)
VHVYAQAQ,
(SEQ ID NO: 5159)
VYLYAQAQ,
or
(SEQ ID NO: 5160)
VHLYTQAQ;
(SEQ ID NO: 4797)
(ii) VHLYAQAQ,
(SEQ ID NO: 4804)
VHHYAQAQ,
(SEQ ID NO: 4798)
VHLYAQPQ,
(SEQ ID NO: 4800)
VHLYAKAQ,
(SEQ ID NO: 4801)
VHLYDQAQ,
(SEQ ID NO: 4799)
VHLYSQAQ,
or
(SEQ ID NO: 4802)
VHIYAQAQ;

[0689] (iii) amino acid sequence comprising any portion of an amino acid sequence in (i) or (ii), e.g., any 2, 3, 4, 5, 6, or 7 amino acids, e.g., consecutive amino acids, thereof;
[0690] (iv) an amino acid sequence comprising at least one, two, or three but no more than four modifications, e.g., substitutions (e.g., conservative substitutions), insertions, or deletions, relative to any of the amino acid sequences in (i) or (ii); or
[0691] (v) an amino acid sequence comprising at least one, two, or three but no more than four different amino acids, relative to any one of the amino acid sequences in (i) or (ii).
[0692] 156. The isolated AAV particle of any one of embodiments 149-155, wherein [B][C] is or comprises VHLYAQAQ (SEQ ID NO: 4797).
[0693] 157. The isolated AAV particle of any one of embodiments 149-159, wherein [A][B][C] comprises:

(SEQ ID NO: 4813)
(i) PLNGAVHLYAQ,
(SEQ ID NO: 4826)
PLNGAVHHYAQ,
(SEQ ID NO: 4812)
PLNGAVHLYAK,
(SEQ ID NO: 4814)
PLNGAVHLYDQ,
(SEQ ID NO: 4815)
PLNGAVHLYSQ,
(SEQ ID NO: 4824)
PLNGAVHIYAQ,
(SEQ ID NO: 5161)
PLNGAVHLYAH,
(SEQ ID NO: 5162)
PLNGAVNLYAQ,
(SEQ ID NO: 5163)
PLNGAVQLYAQ,
(SEQ ID NO: 5164)
PLNGAIHLYAQ,
(SEQ ID NO: 5165)
PLNGALHLYAQ,
(SEQ ID NO: 5166)
PLNGAVPLYAQ,
(SEQ ID NO: 5167)
PLNGAVDLYAQ,
(SEQ ID NO: 5168)
PLNGAAHLYAQ,
(SEQ ID NO: 5169)
PLNGAVHRYAQ,
(SEQ ID NO: 5170)
PLNGAFHLYAQ,
(SEQ ID NO: 5171)
PLNGAVHLYAL,
(SEQ ID NO: 5172)
PLNGADHLYAQ,
(SEQ ID NO: 5173)
PLNGAVHLYAP,
(SEQ ID NO: 5174)
PLNGAVHLYAR,
(SEQ ID NO: 5175)
PLNGAVLLYAQ,
(SEQ ID NO: 5176)
PLNGAGHLYAQ,
(SEQ ID NO: 5177)
PLNGAVRLYAQ,
(SEQ ID NO: 5178)
PLNGAVHVYAQ,
(SEQ ID NO: 5179)
PLNGAVYLYAQ,
(SEQ ID NO: 5180)
PLNGAVHLYTQ;
(SEQ ID NO: 4813)
(ii) PLNGAVHLYAQ,
(SEQ ID NO: 4826)
PLNGAVHHYAQ,
(SEQ ID NO: 4812)
PLNGAVHLYAK,
(SEQ ID NO: 4814)
PLNGAVHLYDQ,
(SEQ ID NO: 4815)
PLNGAVHLYSQ,
(SEQ ID NO: 4824)
PLNGAVHIYAQ;

[0694] (iii) amino acid sequence comprising any portion of an amino acid sequence in (i) or (ii), e.g., any 2, 3, 4, 5, 6, 7, 8, 9, or 10 amino acids, e.g., consecutive amino acids, thereof;
[0695] (iv) an amino acid sequence comprising at least one, two, or three but no more than four modifications, e.g., substitutions (e.g., conservative substitutions), insertions, or deletions, relative to any of the amino acid sequences in (i) or (ii); or
[0696] (v) an amino acid sequence comprising at least one, two, or three but no more than four different amino acids, relative to any one of the amino acid sequences in (i) or (ii).
[0697] 158. The isolated AAV particle of any one of embodiments 149-157, wherein [A][B][C] is or comprises:

(SEQ ID NO: 4836)
(i) PLNGAVHLYAQAQ,
(SEQ ID NO: 4850)
PLNGAVHHYAQAQ,
(SEQ ID NO: 4837)
PLNGAVHLYAQPQ,
(SEQ ID NO: 4835)
PLNGAVHLYAKAQ,
(SEQ ID NO: 4838)
PLNGAVHLYDQAQ,
(SEQ ID NO: 4839)
PLNGAVHLYSQAQ,
(SEQ ID NO: 4848)
PLNGAVHIYAQAQ,
(SEQ ID NO: 5181)
PLNGAVHLYAHAQ,
(SEQ ID NO: 5182)
PLNGAVNLYAQAQ,
(SEQ ID NO: 5183)
PLNGAVQLYAQAQ,
(SEQ ID NO: 5184)
PLNGAVHLYAQEQ,
(SEQ ID NO: 5185)
PLNGAIHLYAQAQ,
(SEQ ID NO: 5186)
PLNGALHLYAQAQ,
(SEQ ID NO: 5187)
PLNGAVPLYAQAQ,
(SEQ ID NO: 5188)
PLNGAVHLYAQAK,
(SEQ ID NO: 5189)
PLNGAVDLYAQAQ,
(SEQ ID NO: 5190)
PLNGAAHLYAQAQ,
(SEQ ID NO: 5191)
PLNGAVHRYAQAQ,
(SEQ ID NO: 5192)
PLNGAFHLYAQAQ,
(SEQ ID NO: 5193)
PLNGAVHLYALAQ,
(SEQ ID NO: 5194)
PLNGADHLYAQAQ,
(SEQ ID NO: 5195)
PLNGAVHLYAPAQ,
(SEQ ID NO: 5196)
PLNGAVHLYARAQ,
(SEQ ID NO: 5197)
PLNGAVHLYAQAH,
(SEQ ID NO: 5198)
PLNGAVLLYAQAQ,
(SEQ ID NO: 5199)
PLNGAVHLYAQAP,
(SEQ ID NO: 5200)
PLNGAGHLYAQAQ,
(SEQ ID NO: 5201)
PLNGAVRLYAQAQ,
(SEQ ID NO: 5202)
PLNGAVHVYAQAQ,
(SEQ ID NO: 5203)
PLNGAVYLYAQAQ,
(SEQ ID NO: 5204)
PLNGAVHLYTQAQ;
(SEQ ID NO: 4836)
(ii) PLNGAVHLYAQAQ,
(SEQ ID NO: 4850)
PLNGAVHHYAQAQ,
(SEQ ID NO: 4837)
PLNGAVHLYAQPQ,
(SEQ ID NO: 4835)
PLNGAVHLYAKAQ,
(SEQ ID NO: 4838)
PLNGAVHLYDQAQ,
(SEQ ID NO: 4839)
PLNGAVHLYSQAQ,
(SEQ ID NO: 4848)
PLNGAVHIYAQAQ;

[0698] (iii) amino acid sequence comprising any portion of an amino acid sequence in (i) or (ii), e.g., any 2, 3, 4, 5, 6, 7, 8, 9, 10, 11, or 12 amino acids, e.g., consecutive amino acids, thereof;
[0699] (iv) an amino acid sequence comprising at least one, two, or three but no more than four modifications, e.g., substitutions (e.g., conservative substitutions), insertions, or deletions, relative to any of the amino acid sequences in (i) or (ii); or
[0700] (v) an amino acid sequence comprising at least one, two, or three but no more than four different amino acids, relative to any one of the amino acid sequences in (i) or (ii).
[0701] 159. The isolated AAV particle of any one of embodiments 149-158, wherein [A][B][C] is or comprises PLNGAVHLYAQAQ (SEQ ID NO: 4836).
[0702] 160. The isolated AAV particle of any one of embodiment 137-159, wherein the AAV capsid variant further comprises one, two, or all of an amino acid other than T at position 593 (e.g., a V, S, L, R, I, A, N, C, Q, M, P, or K), an amino acid other than G at position 594 (e.g., T, M, A, K, S, Q, V, I, R, N, P, L, H, or Y), and/or an amino acid other than W at position 595 (e.g., K, Q, S, P, C, A, G, N, T, R, V, M, H, L, E, F, or Y), relative to a reference sequence numbered according to the amino acid sequence of SEQ ID NO: 138
[0703] 161. The isolated AAV particle of any one of embodiment 137-160, which further comprises one, two, or all of an amino acid other than T at position 600 (e.g., a V, S, L, R, I, A, N, C, Q, M, P, or K), an amino acid other than G at position 601 (e.g., T, M, A, K, S, Q, V, I, R, N, P, L, H, or Y), and/or an amino acid other than W at position 602 (e.g., K, Q, S, P, C, A, G, N, T, R, V, M, H, L, E, F, or Y), relative to a reference sequence numbered according to the amino acid sequence of SEQ ID NO: 5, 8, 3636.
[0704] 162. The isolated AAV particle of any one of embodiment 137-161, which further comprises one, two, three or all of:
   [0705] (i) the amino acid V, S, L, R, I, A, N, C, Q, M, P, or K (e.g., L) at position 593 numbered according to SEQ ID NO: 138 or at position 600 numbered according to SEQ ID NO: 5, 8, or 3636);
   [0706] (ii) the amino acid T, M, A, K, S, Q, V, I, R, N, P, L, H, or Y (e.g., S) at position 594 numbered according to SEQ ID NO: 138, or at position 601 numbered according to SEQ ID NO: 5, 8, or 3636; and/or
   [0707] (iii) the amino acid K, Q, S, P, C, A, G, N, T, R, V, M, H, L, E, F, or Y (e.g. P) at position 595 numbered according to SEQ ID NO: 138 or at position 602 numbered according to SEQ ID NO: 5, 8, or 3636).
[0708] 163. The isolated AAV particle of any one of embodiment 73-162, which further comprises:
   [0709] (i) the amino acid L at position 593 numbered according to SEQ ID NO: 138 or at position 600 numbered according to SEQ ID NO: 5, 8, or 3636);
   [0710] (ii) the amino acid S at position 594 numbered according to SEQ ID NO: 138, or at position 601 numbered according to SEQ ID NO: 5, 8, or 3636; and
   [0711] (iii) the amino acid P at position 595 numbered according to SEQ ID NO: 138 or at position 602 numbered according to SEQ ID NO: 5, 8, or 3636).
[0712] 164. The isolated AAV particle of any one of embodiment 137-162, which further comprises:
   [0713] (i) T at position 593, G at position 594, and/or W at position 595, numbered according to SEQ ID NO: 138;
   [0714] (ii) T at position 600, G at position 601, and/or W at position 602, numbered according to SEQ ID NO: 5, 8, or 3636.
[0715] 165. The isolated AAV particle of any one of embodiments 137-164, wherein the AAV capsid variant further comprises [D], wherein [D] comprises X8, X9, and X10, wherein:
   [0716] (a) position X8 is: T, V, S, L, R, I, A, N, C, Q, M, P, or K;
   [0717] (b) position X9 is: T, M, A, G, K, S, Q, V, I, R, N, P, L, H, or Y; and
   [0718] (c) position X10 is: K, Q, W, S, P, C, A, G, N, T, R, V, M, H, L, E, F, or Y; and/or an amino acid modification, e.g., a conservative substitution, of any of the aforesaid amino acids in (a)-(c).
[0719] 166. The isolated AAV particle of embodiment 165, wherein:
   [0720] (a) position X8 is: T, V, S, L, R, I, A, N, C, Q, or M;
   [0721] (b) position X9 is: T, M, A, G, K, S, Q, V, I, R, N, P, L, or H; and/or
   [0722] (c) position X10 is: K, Q, W, S, P, C, A, G, N, T, R, V, M, H, L, or E.
[0723] 167. The isolated AAV particle of embodiment 165 or 166, wherein [D] comprises:
   [0724] (i) TT, TM, VA, TA, TG, VK, SA, LS, LA, TQ, TV, RI, RA, LT, ST, TS, VS, VT, RQ, IS, VR, LG, TN, VQ, AA, RS, IQ, IA, RG, NS, LQ, VM, SM, VG, CS, TP, SS, AG, TL, LN, TK, CT, AS, LK, LM, LH, RT, RM, VH, TR, SG, VL, QA, NA, AT, NT, RL, IT, IG, RN, NM, NV, MA, IL, VN, SV, RV, PG, QS, RY, SQ, NQ, LL, LP, AQ, TY, NL, SP, LV, KG, VP, AV, KS, AM, SL, AL, RP, IP, MK, AW, GS, KQ, AP, SK, AK, GC, QK, MQ, QP, GP, QQ, AN, GK, QR, PP, AR, GG, MS, NP, KP, MN, KA, SN, MP, HP, GN, RW, MT, SR, GW, QH, GL, QM, VW, MG, AH, QT, GR, SH, GQ, GT, GA, NG, QN, VE, MM, QL, QG, YS, GM, LR, AF, PQ, SW, QW, YA, ML, GF, PA, PS, PT, GY, GV, PW, PR; or
   [0725] (ii) TT, TM, VA, TA, TG, VK, SA, LS, LA, TQ, TV, RI, RA, LT, ST, TS, VS, VT, RQ, IS, VR, LG, TN, VQ, AA, RS, IQ, IA, RG, NS, LQ, VM, SM, VG, CS, TP, SS, AG, TL, LN, TK, CT, AS, LK, LM, LH, RT, RM, VH, TR, SG, VL, QA, NA, AT, NT, RL, IT, IG, RN, NM, NV, MA, IL, VN, SV, RV, MK, AQ, AW, GS, KQ, AP, SK, AK, GC, QK, SP, MQ, SQ, QP, RP, GP, NQ, QQ, AN, GK, QS, QR, PP, AR, GG, MS, NP, KP, MN, KS, KA, SN, MP, HP, GN, RW, MT, AM, SR, GW, QH, GL, AV, QM, VW, MG, AL, AH, SL, QT, GR, SH, LP, GQ, GT, GA, NG, QN, IP, or VE.
[0726] 168. The isolated AAV particle of any one of embodiments 165-167, wherein [D] is or comprises:
   [0727] (i) TTK, TMK, VAQ, TAW, TGS, VKQ, SAP, LSK, LAP, LAQ, TAK, SAK, TGC, TQK, TVA, LSP, TTQ, TAQ, RIA, RAS, TTP, LTP, STP, TSP, TMQ, TSK, VSQ, VSP, TVQ, VTA, RQP, ISG, VRP, LGP, TNQ, VQQ, VAN, AAP, RST, TMA, IQP, IAS, TVS, RGS, NSP, LQP, VTG, VMQ, SMA, VGK, IQS, CSP, LQR, TPP, VTK, SSP, AGP, LAR, TTT, TGG, TLQ, TMS, VAK, RAA, TVG, LNP, LSQ, TKP, TNA, LAT, VTP, VQA, TTS, CTP, TAG, TSQ, TMN, TST, VKP, ASP, VAA, LKS, IAA, TAA, TKA, VSN, TAP, LMP, LHP, RAQ, LTN, RTT, TSV, RMS, VGN, LMQ, TAT, VHP, ISS, VAS, TRW, TMT, RSS, RTG, VAT, VTS, VSS, TNS, VKA, SGP, TGP, TAM, TQP, TQQ, VSR, TGW, VSA, VLS, TQH, LAS, QAP, NAQ, ATP, VQP, TTA, LAA, RSG, LMA, TMP, LAN, VST, SAQ, NTP, TGL, TAV, RLG, RTL, TQM, ITP, TVW, RSA, TAS, TMG, VQS, ISP, VGG, TAL, LAG, RTA, RSP, TLA, LAH, TSL, RLS, LMG, SMQ, TQT, VGS, VSG, VMA, IGG, IAG, TGR, LSH, VQT, RNS, TLP, TKQ, LGQ, NMQ, NVQ, RGG, VMS, TTG, LSR, MAP, ILG, TGT, TSS, TSH, RIG, SAM, TSM, SMG, SMS, TSG, TGA, VNS, VAG, IGS, LGS, VNG, LTA, VQN, TKS, SVG, NAS, TSA, TAN, LTS, RSQ, RIP, RVE, VLP, SVA, LQQ, LST, SAA, RTS, TQN, VNA, LMS, TMM, RSV, TQL, RTP, RQQ, VQG, PGW, STQ, QSP, RYS, TQR, SAG, RQS, SQP, STS, VLG, NQP, LGT, RAG, TGM, LSN, RLP, RQG, RLT, TLR, SAF, SVQ, LLP, RTQ, LPP, AQP, TPQ, TSW, NTT, TTR, TQW, NTQ, TYA, TLS, NLP, ATS, ATQ, LSS, TQA, VMP, NAL, RML, RQL, TLG, TGF, SAL, SQL, LSA, TGQ, TNG, AAA, SAV, LSG, SSR, SPP, LVG, TPA, KGW, VPP, ATG, SAN, SQQ, SSM, AVG, VAP, TPS, RGW, SSL, TYS, TPT, IGW, KSS, TGY, RSL, SVS, TSN, SQM, VPA, AMS, TPG, TGV, VPQ, SLP, ALP, TPW, TPR, SSS, RPP, IPP, AGW, or RPG; or
   [0728] (ii) TTK, TMK, VAQ, TAW, TGS, VKQ, SAP, LSK, LAP, LAQ, TAK, SAK, TGC, TQK, TVA, LSP, TTQ, TAQ, RIA, RAS, TTP, LTP, STP, TSP, TMQ, TSK, VSQ, VSP, TVQ, VTA, RQP, ISG, VRP, LGP, TNQ, VQQ, VAN, AAP, RST, TMA, IQP, IAS, TVS, RGS, NSP, LQP, VTG, VMQ, SMA, VGK, IQS, CSP, LQR, TPP, VTK, SSP, AGP, LAR, TTT, TGG, TLQ, TMS, VAK, RAA, TVG, LNP, LSQ, TKP, TNA, LAT, VTP, VQA, TTS, CTP, TAG, TSQ, TMN, TST, VKP, ASP, VAA, LKS, IAA, TAA, TKA, VSN, TAP, LMP, LHP, RAQ, LTN, RTT, TSV, RMS, VGN, LMQ, TAT, VHP, ISS, VAS, TRW, TMT, RSS, RTG, VAT, VTS, VSS, TNS, VKA, SGP, TGP, TAM, TQP, TQQ, VSR, TGW, VSA, VLS, TQH, LAS, QAP, NAQ, ATP, VQP, TTA, LAA, RSG, LMA, TMP, LAN, VST, SAQ, NTP, TGL, TAV, RLG, RTL, TQM, ITP, TVW, RSA, TAS, TMG, VQS, ISP, VGG, TAL, LAG, RTA, RSP, TLA, LAH, TSL, RLS, LMG, SMQ, TQT, VGS, VSG, VMA, IGG, IAG, TGR, LSH, VQT, RNS, TLP, TKQ, LGQ, NMQ, NVQ, RGG, VMS, TTG, LSR, MAP, ILG, TGT, TSS, TSH, RIG, SAM, TSM, SMG, SMS, TSG, TGA, VNS, VAG, IGS, LGS, VNG, LTA, VQN, TKS, SVG, NAS, TSA, TAN, LTS, RSQ, RIP, RVE, VLP, SVA, LQQ, LST, SAA, RTS, TQN, VNA, or LMS.
[0729] 169. The isolated AAV particle of any one of embodiments 165-168, wherein [D] is or comprises TGW.
[0730] 170. The isolated AAV particle of any one of embodiments 165-168, wherein [D] is or comprises LSP.
[0731] 171. The isolated AAV particle of any one of embodiments 137-170, wherein the AAV capsid variant further comprises one, two, or all of an amino acid other than V at position 596 (e.g., D, F, A, E, L, G, or I), an amino acid other than Q at position 597 (e.g., R, P, K, L, H, or E), and/or an amino acid other than N at position 598 (e.g., H, S, T, P, K, I, D, or Y), relative to a reference sequence numbered according to the amino acid sequence of SEQ ID NO: 138.
[0732] 172. The isolated AAV particle of any one of embodiments 137-171, which further comprises one, two, or all of an amino acid other than V at position 603 (e.g., D, F, A, E, L, G, or I), an amino acid other than Q at position 604 (e.g., R, P, K, L, H, or E), and/or an amino acid other than N at position 605 (e.g., H, S, T, P, K, I, D, or Y), relative to a reference sequence numbered according to the amino acid sequence of SEQ ID NO: 5, 8, or 3636.
[0733] 173. The isolated AAV particle of any one of embodiments 137-172, which further comprises one, two, or all of:
   [0734] (i) the amino acid V, D, F, A, E, L, G, or I at position 596, numbered according to SEQ ID NO: 138, or at position 603 numbered according to SEQ ID NO: 5, 8, or 3636;
   [0735] (ii) the amino acid R, P, K, L, H, or E at position 597, numbered according to SEQ ID NO: 138, or at position 604 numbered according to SEQ ID NO: 5, 8, or 3636; and/or
   [0736] (iii) the amino acid N, H, S, T, P, K, I, D, or Y at position 598, numbered according to SEQ ID NO: 138, or at position 605 numbered according to SEQ ID NO: 5, 8, or 3636.
[0737] 174. The isolated AAV particle of any one of embodiments 137-173, which further comprises P, K, E, or H at position 597, numbered according to SEQ ID NO: 138.
[0738] 175. The isolated AAV particle of any one of embodiments 137-174, which further comprises one, two, or all of:
   [0739] (i) the amino acid V at position 596 numbered according to SEQ ID NO: 138 or at position 603 numbered according to SEQ ID NO: 5, 8, or 3636;
   [0740] (ii) the amino acid K, P, E or H at position 597 numbered according to SEQ ID NO: 138 or at position 604 numbered according to SEQ ID NO: 5, 8, or 3636; and
   [0741] (iii) the amino acid N at position 598 numbered according to the amino acid sequence of SEQ ID NO: 138 or at position 605 numbered according to SEQ ID NO: 5, 8, or 3636.
[0742] 176. The isolated AAV particle of any one of embodiments 137-175, wherein the AAV capsid variant further comprises [E], wherein [E] comprises X11, X12, and X13, wherein:
   [0743] (a) position X11 is: V, D, F, A, E, L, G, or I;
   [0744] (b) position X12 is: Q, R, P, K, L, H, or E; and
   [0745] (c) position X13 is: N, H, S, T, P, K, I, D, or Y; and/or an amino acid modification, e.g., a conservative substitution, of any of the aforesaid amino acids in (a)-(c).
[0746] 177. The isolated AAV particle of embodiment 176, wherein:
   [0747] (a) position X11 is: V, D, F, A, E, L, or G;
   [0748] (b) position X12 is: Q, R, P, K, or L; and/or
   [0749] (c) position X13 is: N, H, S, T, P, K, I, or D.
[0750] 178. The isolated AAV particle of embodiment 176 or 177, wherein:
   [0751] (a) position X11 is V;
   [0752] (b) position X12: Q, R, P, K, or L; and/or
   [0753] (c) position X13 is: N.
[0754] 179. The isolated AAV particle of any one of embodiments 176-178, wherein position X12 is P.
[0755] 180. The isolated AAV particle of any one of embodiments 176-178, wherein position X12 is K.
[0756] 181. The isolated AAV particle of any one of embodiments 176-178, wherein position X12 is E or H.
[0757] 182. The isolated AAV particle of any one of embodiments 176-181, wherein [E] comprises:
   [0758] (i) VQ, DQ, FQ, VR, VP, VK, AQ, EQ, LQ, GQ, VL, VH, VE, DK, GH, IQ, QN, QH, QS, QT, QP, RN, PN, KN, QK, QI, LN, QD, HN, KT, KK, EN, QY, or PH; or
   [0759] (ii) VQ, DQ, FQ, VR, VP, VK, AQ, EQ, LQ, GQ, VL, QN, QH, QS, QT, QP, RN, PN, KN, QK, QI, LN, or QD.
[0760] 183. The isolated AAV particle of any one of embodiments 176-182, wherein [E] is or comprises:
   [0761] (i) VQN, DQN, VQH, FQN, VQS, VQT, VQP, VRN, VPN, VKN, AQN, VQK, EQN, VQI, LQN, GQT, VLN, VQD, VHN, GQN, VKT, VKK, FQK, VEN, VQY, DKN, GHN, IQN, or VPH; or
   [0762] (ii) VQN, DQN, VQH, FQN, VQS, VQT, VQP, VRN, VPN, VKN, AQN, VQK, EQN, VQI, LQN, GQT, VLN, or VQD.
[0763] 184. The isolated AAV particle of any one of embodiments 176-183, wherein [E] is or comprises VQN, VPN, or VKN.
[0764] 185. The isolated AAV particle of any one of embodiments 176-183, wherein [E] is or comprises VEN, VHN, VKN, or VPN.
[0765] 186. The isolated AAV particle of any one of embodiments 176-185, wherein [D][E] is or comprises:

(SEQ ID NO: 5047)
(i) TTKVQN,
(SEQ ID NO: 5013)
TMKVQN,
(SEQ ID NO: 5062)
VAQVQN,
(SEQ ID NO: 4978)
TAWDQN,
(SEQ ID NO: 4992)
TGSVQH,
(SEQ ID NO: 5072)
VKQVQN,
(SEQ ID NO: 4854)
SAPVQN,
(SEQ ID NO: 4912)
LSKVQN,
(SEQ ID NO: 4891)
LAPVQN,
(SEQ ID NO: 4893)
LAQVQN,
(SEQ ID NO: 4968)
TAKVQN,
(SEQ ID NO: 4955)
SAKVQN,
(SEQ ID NO: 4982)
TGCFQN,
(SEQ ID NO: 5026)
TQKVQN,
(SEQ ID NO: 5052)
TVAVQN,
(SEQ ID NO: 4914)
LSPVQN,
(SEQ ID NO: 5050)
TTQVQN,
(SEQ ID NO: 4973)
TAQVQN,
(SEQ ID NO: 4934)
RIAVQN,
(SEQ ID NO: 4931)
RASVQN,
(SEQ ID NO: 5048)
TTPVQN,
(SEQ ID NO: 4853)
LTPVQN,
(SEQ ID NO: 4963)
STPVQN,
(SEQ ID NO: 4861)
TSPVQN,
(SEQ ID NO: 5016)
TMQVQN,
(SEQ ID NO: 5036)
TSKVQN,
(SEQ ID NO: 5092)
VSQVQN,
(SEQ ID NO: 4868)
VSPVQN,
(SEQ ID NO: 5055)
TVQVQN,
(SEQ ID NO: 5097)
VTAVQN,
(SEQ ID NO: 4941)
RQPVQN,
(SEQ ID NO: 4884)
ISGVQN,
(SEQ ID NO: 5087)
VRPVQN,
(SEQ ID NO: 4897)
LGPVQN,
(SEQ ID NO: 5022)
TNQVQN,
(SEQ ID NO: 5084)
VQQVQN,
(SEQ ID NO: 5061)
VANVQN,
(SEQ ID NO: 4870)
AAPVQN,
(SEQ ID NO: 4947)
RSTVQN,
(SEQ ID NO: 5011)
TMAVQN,
(SEQ ID NO: 4882)
IQPVQN,
(SEQ ID NO: 4878)
IASVQN,
(SEQ ID NO: 4867)
TVSVQN,
(SEQ ID NO: 4933)
RGSVQN,
(SEQ ID NO: 4925)
NSPVQN,
(SEQ ID NO: 4908)
LQPVQN,
(SEQ ID NO: 5098)
VTGVQN,
(SEQ ID NO: 5076)
VMQVQN,
(SEQ ID NO: 4959)
SMAVQN,
(SEQ ID NO: 5066)
VGKVQN,
(SEQ ID NO: 4883)
IQSVQN,
(SEQ ID NO: 4874)
CSPVQN,
(SEQ ID NO: 4910)
LQRVQN,
(SEQ ID NO: 4979)
TAWVQH,
(SEQ ID NO: 5024)
TPPVQN,
(SEQ ID NO: 5099)
VTKVQN,
(SEQ ID NO: 4855)
SSPVQN,
(SEQ ID NO: 4871)
AGPVQN,
(SEQ ID NO: 4894)
LARVQN,
(SEQ ID NO: 5051)
TTTVQN,
(SEQ ID NO: 4984)
TGGFQN,
(SEQ ID NO: 5010)
TLQVQN,
(SEQ ID NO: 5018)
TMSVQN,
(SEQ ID NO: 5060)
VAKVQN,
(SEQ ID NO: 4929)
RAAVQN,
(SEQ ID NO: 5054)
TVGVQN,
(SEQ ID NO: 4907)
LNPVQN,
(SEQ ID NO: 4915)
LSQVQN,
(SEQ ID NO: 5006)
TKPVQN,
(SEQ ID NO: 5021)
TNAVQN,
(SEQ ID NO: 4896)
LATVQN,
(SEQ ID NO: 5100)
VTPVQN,
(SEQ ID NO: 5081)
VQAVQN,
(SEQ ID NO: 4860)
TTSVQN,
(SEQ ID NO: 4875)
CTPVQN,
(SEQ ID NO: 4967)
TAGVQN,
(SEQ ID NO: 5040)
TSQVQN,
(SEQ ID NO: 5014)
TMNVQN,
(SEQ ID NO: 5043)
TSTVQN,
(SEQ ID NO: 5071)
VKPVQN,
(SEQ ID NO: 4872)
ASPVQN,
(SEQ ID NO: 5058)
VAAVQN,
(SEQ ID NO: 4901)
LKSVQN,
(SEQ ID NO: 4876)
IAAVQN,
(SEQ ID NO: 4966)
TAAVQN,
(SEQ ID NO: 5005)
TKAVQN,
(SEQ ID NO: 4994)
TGSVQS,
(SEQ ID NO: 5090)
VSNVQN,
(SEQ ID NO: 4971)
TAPVQN,
(SEQ ID NO: 4904)
LMPVQN,
(SEQ ID NO: 4900)
LHPVQN,
(SEQ ID NO: 4930)
RAQVQN,
(SEQ ID NO: 4919)
LTNVQN,
(SEQ ID NO: 4952)
RTTVQN,
(SEQ ID NO: 5044)
TSVVQN,
(SEQ ID NO: 4939)
RMSVQN,
(SEQ ID NO: 5067)
VGNVQN,
(SEQ ID NO: 4905)
LMQVQN,
(SEQ ID NO: 4976)
TATVQN,
(SEQ ID NO: 5069)
VHPVQN,
(SEQ ID NO: 5091)
VSPVQT,
(SEQ ID NO: 4886)
ISSVQN,
(SEQ ID NO: 5063)
VASVQN,
(SEQ ID NO: 5032)
TRWDQN,
(SEQ ID NO: 5020)
TMTVQN,
(SEQ ID NO: 4946)
RSSVQN,
(SEQ ID NO: 4863)
TAWVQN,
(SEQ ID NO: 4949)
RTGVQN,
(SEQ ID NO: 5064)
VATVQN,
(SEQ ID NO: 5101)
VTSVQN,
(SEQ ID NO: 4869)
VSSVQN,
(SEQ ID NO: 5023)
TNSVQN,
(SEQ ID NO: 5070)
VKAVQN,
(SEQ ID NO: 4958)
SGPVQN,
(SEQ ID NO: 4989)
TGPVQN,
(SEQ ID NO: 4969)
TAMVQN,
(SEQ ID NO: 5029)
TQPVQN,
(SEQ ID NO: 5030)
TQQVQN,
(SEQ ID NO: 5093)
VSRVQN,
(SEQ ID NO: 5002)
TGWVQP,
(SEQ ID NO: 5088)
VSAVQN,
(SEQ ID NO: 5074)
VLSVQN,
(SEQ ID NO: 5025)
TQHVQN,
(SEQ ID NO: 4895)
LASVQN,
(SEQ ID NO: 4928)
QAPVQN,
(SEQ ID NO: 4922)
NAQVQN,
(SEQ ID NO: 4873)
ATPVQN,
(SEQ ID NO: 5083)
VQPVQN,
(SEQ ID NO: 5045)
TTAVQN,
(SEQ ID NO: 5004)
TGWVRN,
(SEQ ID NO: 4852)
LAAVQN,
(SEQ ID NO: 5039)
TSPDQN,
(SEQ ID NO: 4943)
RSGVQN,
(SEQ ID NO: 4988)
TGGVQT,
(SEQ ID NO: 5000)
TGWVPN,
(SEQ ID NO: 5049)
TTPVQT,
(SEQ ID NO: 4902)
LMAVQN,
(SEQ ID NO: 5015)
TMPVQN,
(SEQ ID NO: 4890)
LANVQN,
(SEQ ID NO: 5096)
VSTVQN,
(SEQ ID NO: 4957)
SAQVQN,
(SEQ ID NO: 4926)
NTPVQN,
(SEQ ID NO: 5095)
VSSVQT,
(SEQ ID NO: 5056)
TVSVKN,
(SEQ ID NO: 5102)
TGLVQN,
(SEQ ID NO: 4865)
TGSVQN,
(SEQ ID NO: 4983)
TGGAQN,
(SEQ ID NO: 4977)
TAVVQN,
(SEQ ID NO: 4937)
RLGVQN,
(SEQ ID NO: 4950)
RTLVQN,
(SEQ ID NO: 5027)
TQMVQN,
(SEQ ID NO: 4887)
ITPVQN,
(SEQ ID NO: 5057)
TVWVQK,
(SEQ ID NO: 4942)
RSAVQN,
(SEQ ID NO: 4974)
TASVQN,
(SEQ ID NO: 5012)
TMGVQN,
(SEQ ID NO: 4986)
TGGVQH,
(SEQ ID NO: 5085)
VQSVQN,
(SEQ ID NO: 4864)
TGGVQN,
(SEQ ID NO: 4885)
ISPVQN,
(SEQ ID NO: 5103)
TGWVKN,
(SEQ ID NO: 4990)
TGSAQN,
(SEQ ID NO: 4857)
TGWAQN,
(SEQ ID NO: 5019)
TMSVQT,
(SEQ ID NO: 5065)
VGGVQN,
(SEQ ID NO: 4892)
LAPVQT,
(SEQ ID NO: 4862)
TALVQN,
(SEQ ID NO: 4888)
LAGVQN,
(SEQ ID NO: 4948)
RTAVQN,
(SEQ ID NO: 4944)
RSPVQN,
(SEQ ID NO: 4859)
TLAVQN,
(SEQ ID NO: 4889)
LAHVQN,
(SEQ ID NO: 5037)
TSLVQN,
(SEQ ID NO: 4938)
RLSVQN,
(SEQ ID NO: 4903)
LMGVQN,
(SEQ ID NO: 4961)
SMQVQN,
(SEQ ID NO: 5031)
TQTVQN,
(SEQ ID NO: 4997)
TGWEQN,
(SEQ ID NO: 5068)
VGSVQN,
(SEQ ID NO: 5089)
VSGVQN,
(SEQ ID NO: 5075)
VMAVQN,
(SEQ ID NO: 4879)
IGGVQN,
(SEQ ID NO: 4877)
IAGVQN,
(SEQ ID NO: 4856)
TGRVQN,
(SEQ ID NO: 4911)
LSHVQN,
(SEQ ID NO: 5086)
VQTVQN,
(SEQ ID NO: 4866)
TGWDQN,
(SEQ ID NO: 4940)
RNSVQN,
(SEQ ID NO: 5009)
TLPVQN,
(SEQ ID NO: 5007)
TKQVQN,
(SEQ ID NO: 4898)
LGQVQN,
(SEQ ID NO: 4924)
NMQVQN,
(SEQ ID NO: 4927)
NVQVQN,
(SEQ ID NO: 4993)
TGSVQI,
(SEQ ID NO: 4932)
RGGVQN,
(SEQ ID NO: 5077)
VMSVQN,
(SEQ ID NO: 5046)
TTGVQN,
(SEQ ID NO: 4913)
LSPVQK,
(SEQ ID NO: 4916)
LSRVQN,
(SEQ ID NO: 5094)
VSSVQK,
(SEQ ID NO: 4972)
TAPVQT,
(SEQ ID NO: 4921)
MAPVQN,
(SEQ ID NO: 4881)
ILGVQN,
(SEQ ID NO: 4975)
TASVQT,
(SEQ ID NO: 4991)
TGSLQN,
(SEQ ID NO: 4996)
TGTVQN,
(SEQ ID NO: 4995)
TGSVQT,
(SEQ ID NO: 5042)
TSSVQT,
(SEQ ID NO: 5035)
TSHVQN,
(SEQ ID NO: 4935)
RIGVQN,
(SEQ ID NO: 4999)
TGWGQT,
(SEQ ID NO: 4956)
SAMVQN,
(SEQ ID NO: 5038)
TSMVQN,
(SEQ ID NO: 4960)
SMGVQN,
(SEQ ID NO: 4962)
SMSVQN,
(SEQ ID NO: 5041)
TSSVQN,
(SEQ ID NO: 5034)
TSGVQN,
(SEQ ID NO: 4981)
TGAVQN,
(SEQ ID NO: 5080)
VNSVQN,
(SEQ ID NO: 5059)
VAGVQN,
(SEQ ID NO: 4880)
IGSVQN,
(SEQ ID NO: 4899)
LGSVQN,
(SEQ ID NO: 5079)
VNGVQN,
(SEQ ID NO: 4918)
LTAVQN,
(SEQ ID NO: 5082)
VQNVQN,
(SEQ ID NO: 5008)
TKSVQN,
(SEQ ID NO: 4965)
SVGVQN,
(SEQ ID NO: 4980)
TAWVQT,
(SEQ ID NO: 4923)
NASVQN,
(SEQ ID NO: 5033)
TSAVQN,
(SEQ ID NO: 5017)
TMSVKN,
(SEQ ID NO: 4970)
TANVQN,
(SEQ ID NO: 4998)
TGWFQN,
(SEQ ID NO: 4985)
TGGVLN,
(SEQ ID NO: 4920)
LTSVQN,
(SEQ ID NO: 5003)
TGWVQT,
(SEQ ID NO: 4945)
RSQVQN,
(SEQ ID NO: 4936)
RIPVQN,
(SEQ ID NO: 5001)
TGWVQD,
(SEQ ID NO: 4953)
RVEVQN,
(SEQ ID NO: 5073)
VLPVQN,
(SEQ ID NO: 4987)
TGGVQK,
(SEQ ID NO: 4964)
SVAVQN,
(SEQ ID NO: 4909)
LQQVQN,
(SEQ ID NO: 4917)
LSTVQN,
(SEQ ID NO: 4954)
SAAVQN,
(SEQ ID NO: 4951)
RTSVQN,
(SEQ ID NO: 5028)
TQNVQN,
(SEQ ID NO: 5078)
VNAVQN,
(SEQ ID NO: 5053)
TVAVQT,
(SEQ ID NO: 4906)
LMSVQN,
(SEQ ID NO: 4851)
TGWVQN,
(SEQ ID NO: 5105)
TGWVQH,
(SEQ ID NO: 4858)
TGWVQS,
(SEQ ID NO: 5205)
TMMVQN,
(SEQ ID NO: 5206)
TGGVQS,
(SEQ ID NO: 5207)
TGSFQN,
(SEQ ID NO: 5208)
RSVVQN,
(SEQ ID NO: 5209)
TGSVQK,
(SEQ ID NO: 5210)
TQLVQN,
(SEQ ID NO: 5211)
TGGVHN,
(SEQ ID NO: 5212)
RTPVQN,
(SEQ ID NO: 5213)
RQQVQN,
(SEQ ID NO: 5214)
TGSVRN,
(SEQ ID NO: 5215)
VQGVQN,
(SEQ ID NO: 5216)
PGWVQT,
(SEQ ID NO: 5217)
STQVQN,
(SEQ ID NO: 5218)
QSPVQN,
(SEQ ID NO: 5219)
RYSVQN,
(SEQ ID NO: 5220)
TQRVQN,
(SEQ ID NO: 5221)
SAGVQN,
(SEQ ID NO: 5222)
SAPVQT,
(SEQ ID NO: 5223)
RQSVQN,
(SEQ ID NO: 5224)
SQPVQN,
(SEQ ID NO: 5225)
VASVKN,
(SEQ ID NO: 5226)
TAWVRN,
(SEQ ID NO: 5227)
TGGGQN,
(SEQ ID NO: 5228)
STSVQN,
(SEQ ID NO: 5229)
VLGVQN,
(SEQ ID NO: 5230)
NQPVQN,
(SEQ ID NO: 5231)
LGTVQN,
(SEQ ID NO: 5232)
RAGVQN,
(SEQ ID NO: 5233)
TGGVKN,
(SEQ ID NO: 5234)
TAWLQN,
(SEQ ID NO: 5235)
TRWVQK,
(SEQ ID NO: 5236)
LAPVKN,
(SEQ ID NO: 5237)
TGSVQD,
(SEQ ID NO: 5238)
TGMVQN,
(SEQ ID NO: 5239)
LSNVQN,
(SEQ ID NO: 5240)
RLPVQN,
(SEQ ID NO: 5241)
RQGVQN,
(SEQ ID NO: 5242)
STPVQT,
(SEQ ID NO: 5243)
TTPVKN,
(SEQ ID NO: 5244)
RLTVQN,
(SEQ ID NO: 5245)
TLRVQN,
(SEQ ID NO: 5246)
SAFVQN,
(SEQ ID NO: 5247)
SVQVQN,
(SEQ ID NO: 5248)
LLPVQN,
(SEQ ID NO: 5249)
RTQVQN,
(SEQ ID NO: 5250)
TGSDQN,
(SEQ ID NO: 5251)
VASDQN,
(SEQ ID NO: 5252)
VSPVKN,
(SEQ ID NO: 5253)
LPPVQN,
(SEQ ID NO: 5254)
SSPVQT,
(SEQ ID NO: 5255)
AQPVQN,
(SEQ ID NO: 5256)
TPQVQN,
(SEQ ID NO: 5257)
TSWVQN,
(SEQ ID NO: 5258)
TGGDQN,
(SEQ ID NO: 5109)
LSPVKN,
(SEQ ID NO: 5259)
SSPVKN,
(SEQ ID NO: 5260)
NTTVQN,
(SEQ ID NO: 5261)
TTRVQN,
(SEQ ID NO: 5262)
TQWVQN,
(SEQ ID NO: 5263)
TGSVHN,
(SEQ ID NO: 5264)
TGGLQN,
(SEQ ID NO: 5265)
TAWVQK,
(SEQ ID NO: 5266)
TGRVQT,
(SEQ ID NO: 5267)
NTQVQN,
(SEQ ID NO: 5268)
TGWLQN,
(SEQ ID NO: 5269)
TYAVQN,
(SEQ ID NO: 5270)
TLSVQN,
(SEQ ID NO: 5271)
NLPVQN,
(SEQ ID NO: 5272)
TSSDQN,
(SEQ ID NO: 5273)
ATSVQN,
(SEQ ID NO: 5274)
TAWFQN,
(SEQ ID NO: 5275)
ATQVQN,
(SEQ ID NO: 5276)
VSSVKN,
(SEQ ID NO: 5107)
LSSVQN,
(SEQ ID NO: 5277)
TGSGQN,
(SEQ ID NO: 5278)
LQPVQT,
(SEQ ID NO: 5279)
VSAVKN,
(SEQ ID NO: 5280)
TQAVQN,
(SEQ ID NO: 5281)
TGWVQK,
(SEQ ID NO: 5282)
VMPVQN,
(SEQ ID NO: 5283)
TVSVQK,
(SEQ ID NO: 5284)
TAWAQN,
(SEQ ID NO: 5285)
NALVQN,
(SEQ ID NO: 5286)
RMLVQN,
(SEQ ID NO: 5287)
TVAVKN,
(SEQ ID NO: 5288)
RQLVQN,
(SEQ ID NO: 5289)
TLGVQN,
(SEQ ID NO: 5290)
LGPVQT,
(SEQ ID NO: 5291)
TGSVKN,
(SEQ ID NO: 5292)
TMSDQN,
(SEQ ID NO: 5293)
LASVKN,
(SEQ ID NO: 5294)
TGFVQN,
(SEQ ID NO: 5295)
SALVQN,
(SEQ ID NO: 5296)
TGWVKT,
(SEQ ID NO: 5297)
SQLVQN,
(SEQ ID NO: 5298)
TGWGQN,
(SEQ ID NO: 5299)
LSAVQN,
(SEQ ID NO: 5300)
TMQVQT,
(SEQ ID NO: 5301)
TGQVQN,
(SEQ ID NO: 5302)
TSPVKN,
(SEQ ID NO: 5303)
LSQVQT,
(SEQ ID NO: 5304)
TGSVLN,
(SEQ ID NO: 5305)
TNGVQN,
(SEQ ID NO: 5306)
TGWVKK,
(SEQ ID NO: 5307)
AAAVQN,
(SEQ ID NO: 5308)
SAVVQN,
(SEQ ID NO: 5309)
PGWVQH,
(SEQ ID NO: 5310)
TASDQN,
(SEQ ID NO: 5106)
LSGVQN,
(SEQ ID NO: 5311)
SSRVQN,
(SEQ ID NO: 5313)
VQPVQT,
(SEQ ID NO: 5312)
SPPVQN,
(SEQ ID NO: 5314)
TSSVKN,
(SEQ ID NO: 5315)
LSPLQN,
(SEQ ID NO: 5316)
VSQVQK,
(SEQ ID NO: 5317)
LVGVQN,
(SEQ ID NO: 5318)
TLSVKN,
(SEQ ID NO: 5319)
TGWFQK,
(SEQ ID NO: 5320)
TPAVQN,
(SEQ ID NO: 5321)
TVGVKN,
(SEQ ID NO: 5322)
KGWDQN,
(SEQ ID NO: 5323)
TAWVLN,
(SEQ ID NO: 5324)
VPPVQN,
(SEQ ID NO: 5325)
ATGVQN,
(SEQ ID NO: 5326)
TGGVQI,
(SEQ ID NO: 5327)
TGWVLN,
(SEQ ID NO: 5328)
TAWGQN,
(SEQ ID NO: 5329)
TGWVHN,
(SEQ ID NO: 5330)
LGSVQT,
(SEQ ID NO: 5331)
SANVQN,
(SEQ ID NO: 5332)
TGGVQD,
(SEQ ID NO: 5333)
TMAVKN,
(SEQ ID NO: 5334)
TASVKN,
(SEQ ID NO: 5335)
SSPVQK,
(SEQ ID NO: 5336)
TGTVQT,
(SEQ ID NO: 5337)
TGWVQI,
(SEQ ID NO: 5338)
TVWVKN,
(SEQ ID NO: 5339)
SQQVQN,
(SEQ ID NO: 5340)
VGSVQT,
(SEQ ID NO: 5341)
SSMVQN,
(SEQ ID NO: 5342)
TSPVQK,
(SEQ ID NO: 5343)
AVGVQN,
(SEQ ID NO: 5344)
VAPVQN,
(SEQ ID NO: 5345)
TLPVQK,
(SEQ ID NO: 5346)
TGRVQH,
(SEQ ID NO: 5347)
TPSVQN,
(SEQ ID NO: 5348)
TGWVEN,
(SEQ ID NO: 5349)
RGWVQN,
(SEQ ID NO: 5350)
TGSVEN,
(SEQ ID NO: 5351)
SSLVQN,
(SEQ ID NO: 5352)
TAWVKN,
(SEQ ID NO: 5353)
TYSVQN,
(SEQ ID NO: 5354)
LAAVQT,
(SEQ ID NO: 5355)
TALVKN,
(SEQ ID NO: 5356)
TGWVQY,
(SEQ ID NO: 5357)
TLPVQT,
(SEQ ID NO: 5358)
TGLVQH,
(SEQ ID NO: 5359)
TPTVQN,
(SEQ ID NO: 5360)
TASVQK,
(SEQ ID NO: 5361)
TSPVQI,
(SEQ ID NO: 5362)
IGWVQN,
(SEQ ID NO: 5363)
TGWDKN,
(SEQ ID NO: 5364)
KSSVQN,
(SEQ ID NO: 5365)
TGYVQN,
(SEQ ID NO: 5366)
RGWVQT,
(SEQ ID NO: 5367)
RSLVQN,
(SEQ ID NO: 5368)
TGGVEN,
(SEQ ID NO: 5369)
TGCVRN,
(SEQ ID NO: 5370)
LSPVQS,
(SEQ ID NO: 5371)
TGPVQT,
(SEQ ID NO: 5372)
TVGVQK,
(SEQ ID NO: 5373)
TASGQN,
(SEQ ID NO: 5374)
SVSVQN,
(SEQ ID NO: 5375)
SGPVQT,
(SEQ ID NO: 5376)
VMSVKN,
(SEQ ID NO: 5377)
LGSVQK,
(SEQ ID NO: 5378)
TGLVLN,
(SEQ ID NO: 5379)
TSNVQN,
(SEQ ID NO: 5380)
TGWGHN,
(SEQ ID NO: 5381)
SQMVQN,
(SEQ ID NO: 5382)
TVSVHN,
(SEQ ID NO: 5383)
LSSVQT,
(SEQ ID NO: 5384)
TASVRN,
(SEQ ID NO: 5385)
VPAVQN,
(SEQ ID NO: 5386)
TGRVQK,
(SEQ ID NO: 5387)
AMSVQN,
(SEQ ID NO: 5388)
TAWVHN,
(SEQ ID NO: 5389)
TGLVRN,
(SEQ ID NO: 5390)
RTLVQT,
(SEQ ID NO: 5391)
TGSIQN,
(SEQ ID NO: 5392)
LSSVKN,
(SEQ ID NO: 5393)
TLQVQK,
(SEQ ID NO: 5394)
VGSVKN,
(SEQ ID NO: 5395)
LAPLQN,
(SEQ ID NO: 5396)
TPGVQN,
(SEQ ID NO: 5397)
LSAVQT,
(SEQ ID NO: 5398)
TGVVQN,
(SEQ ID NO: 5399)
VPQVQN,
(SEQ ID NO: 5400)
TGCVQK,
(SEQ ID NO: 5401)
TRWVQT,
(SEQ ID NO: 5402)
TGLDQN,
(SEQ ID NO: 5403)
VSSVHN,
(SEQ ID NO: 5404)
KGWVQT,
(SEQ ID NO: 5405)
SLPVQN,
(SEQ ID NO: 5406)
TTSVHN,
(SEQ ID NO: 5407)
TVWVQN,
(SEQ ID NO: 5408)
TAQLQN,
(SEQ ID NO: 5409)
TRWVKN,
(SEQ ID NO: 5410)
TAWIQN,
(SEQ ID NO: 5411)
LSQVKN,
(SEQ ID NO: 5412)
TSTVKN,
(SEQ ID NO: 5413)
ALPVQN,
(SEQ ID NO: 5414)
TSMVQT,
(SEQ ID NO: 5415)
TSSVQH,
(SEQ ID NO: 5416)
TAMVKN,
(SEQ ID NO: 5417)
TPWVQN,
(SEQ ID NO: 5418)
TPRVQN,
(SEQ ID NO: 5419)
SSSVQN,
(SEQ ID NO: 5420)
RPPVQN,
(SEQ ID NO: 5421)
LAGVKN,
(SEQ ID NO: 5422)
TSPAQN,
(SEQ ID NO: 5423)
RSPVQT,
(SEQ ID NO: 5424)
TGWVPH,
(SEQ ID NO: 5425)
PGWGQN,
(SEQ ID NO: 5426)
IPPVQN,
(SEQ ID NO: 5427)
TGRVKN,
(SEQ ID NO: 5428)
TGRLQN,
(SEQ ID NO: 5429)
LSSVQH,
(SEQ ID NO: 5430)
AGWVQT,
(SEQ ID NO: 5431)
TGLVQS,
(SEQ ID NO: 5432)
TGCVQI,
(SEQ ID NO: 5433)
RPGVQN,
(SEQ ID NO: 5434)
TAAVQH,
(SEQ ID NO: 5435)
TGCDQN,
(SEQ ID NO: 5436)
TGRVRN,
(SEQ ID NO: 5437)
TGRDQN;
(SEQ ID NO: 5047)
(ii) TTKVQN,
(SEQ ID NO: 5013)
TMKVQN,
(SEQ ID NO: 5062)
VAQVQN,
(SEQ ID NO: 4978)
TAWDQN,
(SEQ ID NO: 4992)
TGSVQH,
(SEQ ID NO: 5072)
VKQVQN,
(SEQ ID NO: 4854)
SAPVQN,
(SEQ ID NO: 4912)
LSKVQN,
(SEQ ID NO: 4891)
LAPVQN,
(SEQ ID NO: 4893)
LAQVQN,
(SEQ ID NO: 4968)
TAKVQN,
(SEQ ID NO: 4955)
SAKVQN,
(SEQ ID NO: 4982)
TGCFQN,
(SEQ ID NO: 5026)
TQKVQN,
(SEQ ID NO: 5052)
TVAVQN,
(SEQ ID NO: 4914)
LSPVQN,
(SEQ ID NO: 5050)
TTQVQN,
(SEQ ID NO: 4973)
TAQVQN,
(SEQ ID NO: 4934)
RIAVQN,
(SEQ ID NO: 4931)
RASVQN,
(SEQ ID NO: 5048)
TTPVQN,
(SEQ ID NO: 4853)
LTPVQN,
(SEQ ID NO: 4963)
STPVQN,
(SEQ ID NO: 4861)
TSPVQN,
(SEQ ID NO: 5016)
TMQVQN,
(SEQ ID NO: 5036)
TSKVQN,
(SEQ ID NO: 5092)
VSQVQN,
(SEQ ID NO: 4868)
VSPVQN,
(SEQ ID NO: 5055)
TVQVQN,
(SEQ ID NO: 5097)
VTAVQN,
(SEQ ID NO: 4941)
RQPVQN,
(SEQ ID NO: 4884)
ISGVQN,
(SEQ ID NO: 5087)
VRPVQN,
(SEQ ID NO: 4897)
LGPVQN,
(SEQ ID NO: 5022)
TNQVQN,
(SEQ ID NO: 5084)
VQQVQN,
(SEQ ID NO: 5061)
VANVQN,
(SEQ ID NO: 4870)
AAPVQN,
(SEQ ID NO: 4947)
RSTVQN,
(SEQ ID NO: 5011)
TMAVQN,
(SEQ ID NO: 4882)
IQPVQN,
(SEQ ID NO: 4878)
IASVQN,
(SEQ ID NO: 4867)
TVSVQN,
(SEQ ID NO: 4933)
RGSVQN,
(SEQ ID NO: 4925)
NSPVQN,
(SEQ ID NO: 4908)
LQPVQN,
(SEQ ID NO: 5098)
VTGVQN,
(SEQ ID NO: 5076)
VMQVQN,
(SEQ ID NO: 4959)
SMAVQN,
(SEQ ID NO: 5066)
VGKVQN,
(SEQ ID NO: 4883)
IQSVQN,
(SEQ ID NO: 4874)
CSPVQN,
(SEQ ID NO: 4910)
LQRVQN,
(SEQ ID NO: 4979)
TAWVQH,
(SEQ ID NO: 5024)
TPPVQN,
(SEQ ID NO: 5099)
VTKVQN,
(SEQ ID NO: 4855)
SSPVQN,
(SEQ ID NO: 4871)
AGPVQN,
(SEQ ID NO: 4894)
LARVQN,
(SEQ ID NO: 5051)
TTTVQN,
(SEQ ID NO: 4984)
TGGFQN,
(SEQ ID NO: 5010)
TLQVQN,
(SEQ ID NO: 5018)
TMSVQN,
(SEQ ID NO: 5060)
VAKVQN,
(SEQ ID NO: 4929)
RAAVQN,
(SEQ ID NO: 5054)
TVGVQN,
(SEQ ID NO: 4907)
LNPVQN,
(SEQ ID NO: 4915)
LSQVQN,
(SEQ ID NO: 5006)
TKPVQN,
(SEQ ID NO: 5021)
TNAVQN,
(SEQ ID NO: 4896)
LATVQN,
(SEQ ID NO: 5100)
VTPVQN,
(SEQ ID NO: 5081)
VQAVQN,
(SEQ ID NO: 4860)
TTSVQN,
(SEQ ID NO: 4875)
CTPVQN,
(SEQ ID NO: 4967)
TAGVQN,
(SEQ ID NO: 5040)
TSQVQN,
(SEQ ID NO: 5014)
TMNVQN,
(SEQ ID NO: 5043)
TSTVQN,
(SEQ ID NO: 5071)
VKPVQN,
(SEQ ID NO: 4872)
ASPVQN,
(SEQ ID NO: 5058)
VAAVQN,
(SEQ ID NO: 4901)
LKSVQN,
(SEQ ID NO: 4876)
IAAVQN,
(SEQ ID NO: 4966)
TAAVQN,
(SEQ ID NO: 5005)
TKAVQN,
(SEQ ID NO: 4994)
TGSVQS,
(SEQ ID NO: 5090)
VSNVQN,
(SEQ ID NO: 4971)
TAPVQN,
(SEQ ID NO: 4904)
LMPVQN,
(SEQ ID NO: 4900)
LHPVQN,
(SEQ ID NO: 4930)
RAQVQN,
(SEQ ID NO: 4919)
LTNVQN,
(SEQ ID NO: 4952)
RTTVQN,
(SEQ ID NO: 5044)
TSVVQN,
(SEQ ID NO: 4939)
RMSVQN,
(SEQ ID NO: 5067)
VGNVQN,
(SEQ ID NO: 4905)
LMQVQN,
(SEQ ID NO: 4976)
TATVQN,
(SEQ ID NO: 5069)
VHPVQN,
(SEQ ID NO: 5091)
VSPVQT,
(SEQ ID NO: 4886)
ISSVQN,
(SEQ ID NO: 5063)
VASVQN,
(SEQ ID NO: 5032)
TRWDQN,
(SEQ ID NO: 5020)
TMTVQN,
(SEQ ID NO: 4946)
RSSVQN,
(SEQ ID NO: 4863)
TAWVQN,
(SEQ ID NO: 4949)
RTGVQN,
(SEQ ID NO: 5064)
VATVQN,
(SEQ ID NO: 5101)
VTSVQN,
(SEQ ID NO: 4869)
VSSVQN,
(SEQ ID NO: 5023)
TNSVQN,
(SEQ ID NO: 5070)
VKAVQN,
(SEQ ID NO: 4958)
SGPVQN,
(SEQ ID NO: 4989)
TGPVQN,
(SEQ ID NO: 4969)
TAMVQN,
(SEQ ID NO: 5029)
TQPVQN,
(SEQ ID NO: 5030)
TQQVQN,
(SEQ ID NO: 5093)
VSRVQN,
(SEQ ID NO: 5002)
TGWVQP,
(SEQ ID NO: 5088)
VSAVQN,
(SEQ ID NO: 5074)
VLSVQN,
(SEQ ID NO: 5025)
TQHVQN,
(SEQ ID NO: 4895)
LASVQN,
(SEQ ID NO: 4928)
QAPVQN,
(SEQ ID NO: 4922)
NAQVQN,
(SEQ ID NO: 4873)
ATPVQN,
(SEQ ID NO: 5083)
VQPVQN,
(SEQ ID NO: 5045)
TTAVQN,
(SEQ ID NO: 5004)
TGWVRN,
(SEQ ID NO: 4852)
LAAVQN,
(SEQ ID NO: 5039)
TSPDQN,
(SEQ ID NO: 4943)
RSGVQN,
(SEQ ID NO: 4988)
TGGVQT,
(SEQ ID NO: 5000)
TGWVPN,
(SEQ ID NO: 5049)
TTPVQT,
(SEQ ID NO: 4902)
LMAVQN,
(SEQ ID NO: 5015)
TMPVQN,
(SEQ ID NO: 4890)
LANVQN,
(SEQ ID NO: 5096)
VSTVQN,
(SEQ ID NO: 4957)
SAQVQN,
(SEQ ID NO: 4926)
NTPVQN,
(SEQ ID NO: 5095)
VSSVQT,
(SEQ ID NO: 5056)
TVSVKN,
(SEQ ID NO: 5102)
TGLVQN,
(SEQ ID NO: 4865)
TGSVQN,
(SEQ ID NO: 4983)
TGGAQN,
(SEQ ID NO: 4977)
TAVVQN,
(SEQ ID NO: 4937)
RLGVQN,
(SEQ ID NO: 4950)
RTLVQN,
(SEQ ID NO: 5027)
TQMVQN,
(SEQ ID NO: 4887)
ITPVQN,
(SEQ ID NO: 5057)
TVWVQK,
(SEQ ID NO: 4942)
RSAVQN,
(SEQ ID NO: 4974)
TASVQN,
(SEQ ID NO: 5012)
TMGVQN,
(SEQ ID NO: 4986)
TGGVQH,
(SEQ ID NO: 5085)
VQSVQN,
(SEQ ID NO: 4864)
TGGVQN,
(SEQ ID NO: 4885)
ISPVQN,
(SEQ ID NO: 5103)
TGWVKN,
(SEQ ID NO: 4990)
TGSAQN,
(SEQ ID NO: 4857)
TGWAQN,
(SEQ ID NO: 5019)
TMSVQT,
(SEQ ID NO: 5065)
VGGVQN,
(SEQ ID NO: 4892)
LAPVQT,
(SEQ ID NO: 4862)
TALVQN,
(SEQ ID NO: 4888)
LAGVQN,
(SEQ ID NO: 4948)
RTAVQN,
(SEQ ID NO: 4944)
RSPVQN,
(SEQ ID NO: 4859)
TLAVQN,
(SEQ ID NO: 4889)
LAHVQN,
(SEQ ID NO: 5037)
TSLVQN,
(SEQ ID NO: 4938)
RLSVQN,
(SEQ ID NO: 4903)
LMGVQN,
(SEQ ID NO: 4961)
SMQVQN,
(SEQ ID NO: 5031)
TQTVQN,
(SEQ ID NO: 4997)
TGWEQN,
(SEQ ID NO: 5068)
VGSVQN,
(SEQ ID NO: 5089)
VSGVQN,
(SEQ ID NO: 5075)
VMAVQN,
(SEQ ID NO: 4879)
IGGVQN,
(SEQ ID NO: 4877)
IAGVQN,
(SEQ ID NO: 4856)
TGRVQN,
(SEQ ID NO: 4911)
LSHVQN,
(SEQ ID NO: 5086)
VQTVQN,
(SEQ ID NO: 4866)
TGWDQN,
(SEQ ID NO: 4940)
RNSVQN,
(SEQ ID NO: 5009)
TLPVQN,
(SEQ ID NO: 5007)
TKQVQN,
(SEQ ID NO: 4898)
LGQVQN,
(SEQ ID NO: 4924)
NMQVQN,
(SEQ ID NO: 4927)
NVQVQN,
(SEQ ID NO: 4993)
TGSVQI,
(SEQ ID NO: 4932)
RGGVQN,
(SEQ ID NO: 5077)
VMSVQN,
(SEQ ID NO: 5046)
TTGVQN,
(SEQ ID NO: 4913)
LSPVQK,
(SEQ ID NO: 4916)
LSRVQN,
(SEQ ID NO: 5094)
VSSVQK,
(SEQ ID NO: 4972)
TAPVQT,
(SEQ ID NO: 4921)
MAPVQN,
(SEQ ID NO: 4881)
ILGVQN,
(SEQ ID NO: 4975)
TASVQT,
(SEQ ID NO: 4991)
TGSLQN,
(SEQ ID NO: 4996)
TGTVQN,
(SEQ ID NO: 4995)
TGSVQT,
(SEQ ID NO: 5042)
TSSVQT,
(SEQ ID NO: 5035)
TSHVQN,
(SEQ ID NO: 4935)
RIGVQN,
(SEQ ID NO: 4999)
TGWGQT,
(SEQ ID NO: 4956)
SAMVQN,
(SEQ ID NO: 5038)
TSMVQN,
(SEQ ID NO: 4960)
SMGVQN,
(SEQ ID NO: 4962)
SMSVQN,
(SEQ ID NO: 5041)
TSSVQN,
(SEQ ID NO: 5034)
TSGVQN,
(SEQ ID NO: 4981)
TGAVQN,
(SEQ ID NO: 5080)
VNSVQN,
(SEQ ID NO: 5059)
VAGVQN,
(SEQ ID NO: 4880)
IGSVQN,
(SEQ ID NO: 4899)
LGSVQN,
(SEQ ID NO: 5079)
VNGVQN,
(SEQ ID NO: 4918)
LTAVQN,
(SEQ ID NO: 5082)
VQNVQN,
(SEQ ID NO: 5008)
TKSVQN,
(SEQ ID NO: 4965)
SVGVQN,
(SEQ ID NO: 4980)
TAWVQT,
(SEQ ID NO: 4923)
NASVQN,
(SEQ ID NO: 5033)
TSAVQN,
(SEQ ID NO: 5017)
TMSVKN,
(SEQ ID NO: 4970)
TANVQN,
(SEQ ID NO: 4998)
TGWFQN,
(SEQ ID NO: 4985)
TGGVLN,
(SEQ ID NO: 4920)
LTSVQN,
(SEQ ID NO: 5003)
TGWVQT,
(SEQ ID NO: 4945)
RSQVQN,
(SEQ ID NO: 4936)
RIPVQN,
(SEQ ID NO: 5001)
TGWVQD,
(SEQ ID NO: 4953)
RVEVQN,
(SEQ ID NO: 5073)
VLPVQN,
(SEQ ID NO: 4987)
TGGVQK,
(SEQ ID NO: 4964)
SVAVQN,
(SEQ ID NO: 4909)
LQQVQN,
(SEQ ID NO: 4917)
LSTVQN,
(SEQ ID NO: 4954)
SAAVQN,
(SEQ ID NO: 4951)
RTSVQN,
(SEQ ID NO: 5028)
TQNVQN,
(SEQ ID NO: 5078)
VNAVQN,
(SEQ ID NO: 5053)
TVAVQT,
(SEQ ID NO: 4906)
LMSVQN,
(SEQ ID NO: 4851)
TGWVQN;

[0766] (iii) amino acid sequence comprising any portion of an amino acid sequence in (i) or (ii), e.g., any 2, 3, 4, or 5 amino acids, e.g., consecutive amino acids, thereof;
[0767] (iv) an amino acid sequence comprising at least one, two, or three but no more than four modifications, e.g., substitutions (e.g., conservative substitutions), insertions, or deletions, relative to any of the amino acid sequences in (i) or (ii); or
[0768] (v) an amino acid sequence comprising at least one, two, or three but no more than four different amino acids, relative to any one of the amino acid sequences in (i) or (ii).
[0769] 187. The isolated AAV particle of any one of embodiments 176-186, wherein [D][E] is or comprises TGWVQN (SEQ ID NO: 4851), TGWVPN (SEQ ID NO: 5000), or LSPVKN (SEQ ID NO: 5109).
[0770] 188. The isolated AAV particle of any one of embodiments 176-187, wherein:
   [0771] (i) [B] is or comprises: VHLY (SEQ ID NO: 4680), VHHY (SEQ ID NO: 4683), VHIY (SEQ ID NO: 4681), VNLY (SEQ ID NO: 4724), VQLY (SEQ ID NO: 4729), IHLY (SEQ ID NO: 4730), LHLY (SEQ ID NO: 4727), VPLY (SEQ ID NO: 4723), VDLY (SEQ ID NO: 4731), AHLY (SEQ ID NO: 4732), VHRY (SEQ ID NO: 4725), FHLY (SEQ ID NO: 4726), DHLY (SEQ ID NO: 4728), VLLY (SEQ ID NO: 4733), GHLY (SEQ ID NO: 4734), VRLY (SEQ ID NO: 4735), VHVY (SEQ ID NO: 4682), or VYLY (SEQ ID NO: 4736);
   [0772] (ii) [C] is or comprises: AQAQ (SEQ ID NO: 4737), AQPQ (SEQ ID NO: 4739), AKAQ (SEQ ID NO: 4741), DQAQ (SEQ ID NO: 4744), SQAQ (SEQ ID NO: 4738), AHAQ (SEQ ID NO: 4742), AQEQ (SEQ ID NO: 4748), AQAK (SEQ ID NO: 4746), ALAQ (SEQ ID NO: 4749), APAQ (SEQ ID NO: 4745), ARAQ (SEQ ID NO: 4750), AQAH (SEQ ID NO: 4747), AQAP (SEQ ID NO: 4743), or TQAQ (SEQ ID NO: 4751);
   [0773] (iii) [D] is or comprises: TTK, TMK, VAQ, TAW, TGS, VKQ, SAP, LSK, LAP, LAQ, TAK, SAK, TGC, TQK, TVA, LSP, TTQ, TAQ, RIA, RAS, TTP, LTP, STP, TSP, TMQ, TSK, VSQ, VSP, TVQ, VTA, RQP, ISG, VRP, LGP, TNQ, VQQ, VAN, AAP, RST, TMA, IQP, IAS, TVS, RGS, NSP, LQP, VTG, VMQ, SMA, VGK, IQS, CSP, LQR, TPP, VTK, SSP, AGP, LAR, TTT, TGG, TLQ, TMS, VAK, RAA, TVG, LNP, LSQ, TKP, TNA, LAT, VTP, VQA, TTS, CTP, TAG, TSQ, TMN, TST, VKP, ASP, VAA, LKS, IAA, TAA, TKA, VSN, TAP, LMP, LHP, RAQ, LTN, RTT, TSV, RMS, VGN, LMQ, TAT, VHP, ISS, VAS, TRW, TMT, RSS, RTG, VAT, VTS, VSS, TNS, VKA, SGP, TGP, TAM, TQP, TQQ, VSR, TGW, VSA, VLS, TQH, LAS, QAP, NAQ, ATP, VQP, TTA, LAA, RSG, LMA, TMP, LAN, VST, SAQ, NTP, TGL, TAV, RLG, RTL, TQM, ITP, TVW, RSA, TAS, TMG, VQS, ISP, VGG, TAL, LAG, RTA, RSP, TLA, LAH, TSL, RLS, LMG, SMQ, TQT, VGS, VSG, VMA, IGG, IAG, TGR, LSH, VQT, RNS, TLP, TKQ, LGQ, NMQ, NVQ, RGG, VMS, TTG, LSR, MAP, ILG, TGT, TSS, TSH, RIG, SAM, TSM, SMG, SMS, TSG, TGA, VNS, VAG, IGS, LGS, VNG, LTA, VQN, TKS, SVG, NAS, TSA, TAN, LTS, RSQ, RIP, RVE, VLP, SVA, LQQ, LST, SAA, RTS, TQN, VNA, LMS, TMM, RSV, TQL, RTP, RQQ, VQG, PGW, STQ, QSP, RYS, TQR, SAG, RQS, SQP, STS, VLG, NQP, LGT, RAG, TGM, LSN, RLP, RQG, RLT, TLR, SAF, SVQ, LLP, RTQ, LPP, AQP, TPQ, TSW, NTT, TTR, TQW, NTQ, TYA, TLS, NLP, ATS, ATQ, LSS, TQA, VMP, NAL, RML, RQL, TLG, TGF, SAL, SQL, LSA, TGQ, TNG, AAA, SAV, LSG, SSR, SPP, LVG, TPA, KGW, VPP, ATG, SAN, SQQ, SSM, AVG, VAP, TPS, RGW, SSL, TYS, TPT, IGW, KSS, TGY, RSL, SVS, TSN, SQM, VPA, AMS, TPG, TGV, VPQ, SLP, ALP, TPW, TPR, SSS, RPP, IPP, AGW, or RPG; and/or
   [0774] (iv) [E] is or comprises: VQN, DQN, VQH, FQN, VQS, VQT, VQP, VRN, VPN, VKN, AQN, VQK, EQN, VQI, LQN, GQT, VLN, VQD, VHN, GQN, VKT, VKK, FQK, VEN, VQY, DKN, GHN, IQN, or VPH.
[0775] 189. The isolated AAV particle of any one of embodiments 95-100, wherein:
   [0776] (i) [B] is or comprises: VHLY (SEQ ID NO: 4680), VHHY (SEQ ID NO: 4683), or VHIY (SEQ ID NO: 4681);
   [0777] (ii) [C] is or comprises: AQAQ (SEQ ID NO: 4737), AQPQ (SEQ ID NO: 4739), AKAQ (SEQ ID NO: 4741), DQAQ (SEQ ID NO: 4744), or SQAQ (SEQ ID NO: 4738);
   [0778] (iii) [D] is or comprises: TTK, TMK, VAQ, TAW, TGS, VKQ, SAP, LSK, LAP, LAQ, TAK, SAK, TGC, TQK, TVA, LSP, TTQ, TAQ, RIA, RAS, TTP, LTP, STP, TSP, TMQ, TSK, VSQ, VSP, TVQ, VTA, RQP, ISG, VRP, LGP, TNQ, VQQ, VAN, AAP, RST, TMA, IQP, IAS, TVS, RGS, NSP, LQP, VTG, VMQ, SMA, VGK, IQS, CSP, LQR, TPP, VTK, SSP, AGP, LAR, TTT, TGG, TLQ, TMS, VAK, RAA, TVG, LNP, LSQ, TKP, TNA, LAT, VTP, VQA, TTS, CTP, TAG, TSQ, TMN, TST, VKP, ASP, VAA, LKS, IAA, TAA, TKA, VSN, TAP, LMP, LHP, RAQ, LTN, RTT, TSV, RMS, VGN, LMQ, TAT, VHP, ISS, VAS, TRW, TMT, RSS, RTG, VAT, VTS, VSS, TNS, VKA, SGP, TGP, TAM, TQP, TQQ, VSR, TGW, VSA, VLS, TQH, LAS, QAP, NAQ, ATP, VQP, TTA, LAA, RSG, LMA, TMP, LAN, VST, SAQ, NTP, TGL, TAV, RLG, RTL, TQM, ITP, TVW, RSA, TAS, TMG, VQS, ISP, VGG, TAL, LAG, RTA, RSP, TLA, LAH, TSL, RLS, LMG, SMQ, TQT, VGS, VSG, VMA, IGG, IAG, TGR, LSH, VQT, RNS, TLP, TKQ, LGQ, NMQ, NVQ, RGG, VMS, TTG, LSR, MAP, ILG, TGT, TSS, TSH, RIG, SAM, TSM, SMG, SMS, TSG, TGA, VNS, VAG, IGS, LGS, VNG, LTA, VQN, TKS, SVG, NAS, TSA, TAN, LTS, RSQ, RIP, RVE, VLP, SVA, LQQ, LST, SAA, RTS, TQN, VNA, or LMS; and/or
   [0779] (iv) [E] is or comprises: VQN, DQN, VQH, FQN, VQS, VQT, VQP, VRN, VPN, VKN, AQN, VQK, EQN, VQI, LQN, GQT, VLN, or VQD.
[0780] 190. The isolated AAV particle of any one of embodiments 176-189, wherein [A][B][C][D][E] comprises:
   [0781] (i) the amino acid sequence of any of SEQ ID NOs: 143, 148, 149, 151, 153, 154-158, 160-163, 166, 168, 170, 171, 173-175, 177-179, 181, 182, 184-188, 191-197, 199-210, 212-215, 217-225, 227-231, 233, 234, 236-240, 243-262, 265, 267, 268, 270-277, 279, 282, 284-286, 288-293, 295, 296, 298, 300-314, 316-327, 329, 331, 332, 334, 336, 337-344, 346-350, 352-354, 356-365, 367, 369, 371-380, 382-385, 387, 392-394, 396, 397, 399-401, 404-411, 413-415, 417, 419-429, 432, 433, 435-437, 438, 440-442, 444-447, 450-454, 456, 458-461, 464, 465, 467-469, 471-484, 487-495, 497, 498, 500-503, 505, 507-512, 514-517, 522-525, 528-539, 542-545, 547, 551-555, 558-561, 563-568, 570, 573, 574, 576, 579, 581, 582, 584, 586, 587, 591-596, 598, 601, 604, 605, 606, 607, 610, 612, 614-619, 624-629, 631-636, 640, 641, 645, 646, 649, 650, 656, 658, 661, 663, 664, 666, 668, 669, 670, 672, 673, 674, 675, 677, 679, 683, 684, 686, 688, 689, 691, 693, 695, 696, 697, 699, 700, 701, 702, 704-706, 709-714, 720, 722, 725-731, 733, 736, 740, 745, 749-752, 754, 755, 757, 758, 760-765, 767, 768, 770, 771, 773, 778-780, 783-788, 792-794, 797-799, 801, 802, 804-806, 812, 814, 815, 817, 818, 820, 821, 824, 828, 831, 832, 834-837, 839, 840-845, 847, 848, 850-855, 857-859, 861, 862, 865, 866, 869-872, 874-876, 882-884, 887, 889-895, 897, 899, 901, 903-905, 907, 908, 910, 911, 913, 915, 919, 920, 923, 924, 926, 927, 929, 931-933, 935, 937, 939-949, 952-955, 957, 958, 960, 962, 964, 965, 967, 971, 973, 974, 976, 977, 981, 985-989, 992, 994, 997-1000, 1002, 1004, 1006-1008, 1010, 1013, 1015, 1017, 1018, 1020, 1021, 1023-1025, 1027, 1029-1031, 1033-1035, 1037-1040, 1043, 1046, 1049, 1052, 1053, 1056, 1057, 1059, 1062, 1064, 1065, 1067, 1068, 1070, 1073, 1075, 1077-1080, 1083-1087, 1089, 1090, 1093, 1094, 1097, 1100, 1101, 1103, 1105-1107, 1110-1112, 1114-1117, 1119, 1121, 1125, 1126, 1129, 1132, 1133, 1135;
   [0782] (ii) an amino acid sequence comprising any portion of an amino acid sequence in (i), e.g., any 2, 3, 4, 5, 6, 7, 8, 9, 10, 11, 12, 13, 14, 15, 16, 17, or 18 amino acids, e.g., consecutive amino acids, thereof;
   [0783] (iii) an amino acid sequence comprising at least one, two, or three but no more than four modifications, e.g., substitutions (e.g., conservative substitutions), insertions, or deletions, relative to any of the amino acid sequences in (i); or
   [0784] (iv) an amino acid sequence comprising at least one, two, or three but no more than four different amino acids, relative to any one of the amino acid sequences in (i).
[0785] 191. The isolated AAV particle of any one of embodiments 176-190, wherein [A][B][C][D][E] comprises:
   [0786] (i) the amino acid sequence of any of SEQ ID NOs: 139, 143, 148, 149, 151, 153-158, 160-163, 166, 168, 170, 171, 173-175, 177-179, 181, 182, 184-188, 191-197, 199, 200, 201-210, 212-215, 217-225, 227-231, 233, 234, 236-240, 243-262, 265, 267, 268, 270-277, 279, 282, 284-286, 288-293, 295, 296, 298, 300-314, 316-327, 329, 331, 332, 334, 336, 337-344, 346-350, 352-354, 356-365, 367, 369, 371-380, 382-385, 387, 392-394, 396, 397, 399-401, 404, 405, 406-411, 413-415, 417, 419-429, 432, 433, 435-438, 440-442, 444-447, 450-454, 456, 458-461, 464, 465, 467-469, or 471-476;
   [0787] (ii) an amino acid sequence comprising any portion of an amino acid sequence in (i), e.g., any 2, 3, 4, 5, 6, 7, 8, 9, 10, 11, 12, 13, 14, 15, 16, 17, or 18 amino acids, e.g., consecutive amino acids, thereof;
   [0788] (iii) an amino acid sequence comprising at least one, two, or three but no more than four modifications, e.g., substitutions (e.g., conservative substitutions), insertions, or deletions, relative to any of the amino acid sequences in (i); or
   [0789] (iv) an amino acid sequence comprising at least one, two, or three but no more than four different amino acids, relative to any one of the amino acid sequences in (i).
[0790] 192. The isolated AAV particle of any one of embodiments 176-191, wherein [A][B][C][D][E] comprises the amino acid sequence of PLNGAVHLYAQAQTGWVPN (SEQ ID NO: 314).
[0791] 193. The isolated AAV particle of any one of embodiments 176-191, wherein [A][B][C][D][E] comprises the amino acid sequence of PLNGAVHLYAQAQLSPVKN (SEQ ID NO: 566).
[0792] 194. The isolated AAV particle of any one of embodiments 176-191, wherein [A][B][C][D][E] comprises the amino acid sequence the amino acid sequence of PLNGAVHLYAQAQTGWVQN (SEQ ID NO: 476).
[0793] 195. The isolated AAV particle of any one of embodiments 137-194, wherein [A][B] is present in loop VIII.
[0794] 196. The isolated AAV particle of any one of embodiments 176-195, wherein [C], [D], and/or [E] is present in loop VIII.
[0795] 197. The isolated AAV particle of any one of embodiments 176-196, wherein [A][B][C][D][E] is present in loop VIII.
[0796] 198. The isolated AAV particle of any one of embodiments 176-197, which comprises an amino acid other than A at position 587 and/or an amino acid other than Q at position 588, numbered according to SEQ ID NO: 138.
[0797] 199. The isolated AAV particle of any one of embodiments 176-198, which comprises:
   [0798] (i) the amino acid P at position 587, numbered according to SEQ ID NO: 5, 8, 138, or 3636; and/or
   [0799] (ii) the amino acid L at position 588, numbered according to SEQ ID NO: 5, 8, 138, or 3636.
[0800] 200. The isolated AAV particle of any one of embodiments 137-199, wherein [A] is present immediately subsequent to position 586, relative to a reference sequence numbered according to the amino acid sequence of SEQ ID NO: 5, 8, 138, or 3636.
[0801] 201. The isolated AAV particle of any one of embodiments 137-200, wherein [A] is present immediately subsequent to position 586, and replaces positions 587 and 588 (e.g., A587 and Q588), numbered according to SEQ ID NO: 138.
[0802] 202. The isolated AAV particle of any one of embodiments 137-201, wherein [A] replaces positions 587 and 588 (e.g., A587 and Q588), numbered according to SEQ ID NO: 138.
[0803] 203. The isolated AAV particle of any one of embodiments 137-202, wherein [A] corresponds to positions 587-591 of SEQ ID NO: 5, 8, or 3636.
[0804] 204. The isolated AAV particle of any one of embodiments 137-203, wherein [B] is present immediately subsequent to [A].
[0805] 205. The isolated AAV particle of any one of embodiments 137-204, wherein [B] is present immediately subsequent to [A], wherein [A] is present immediately subsequent to position 586, relative to a reference sequence numbered according to the amino acid sequence of SEQ ID NO: 5, 8, 138, or 3636.
[0806] 206. The isolated AAV particle of any one of embodiments 137-205, wherein [B] is present immediately subsequent to [A], wherein [A] is present immediately subsequent to position 586 and replaces positions 587 and 588 (e.g., A587 and Q588), numbered according to SEQ ID NO: 138.
[0807] 207. The isolated AAV particle of any one of embodiments 137-206, wherein [B] corresponds to positions 592 to 595 of SEQ ID NO: 5, 8, or 3636.
[0808] 208. The isolated AAV particle of any one of embodiments 137-207, wherein [A][B] replaces positions 587 and 588 (e.g., A587 and Q588), numbered according to SEQ ID NO: 138.
[0809] 209. The isolated AAV particle of any one of embodiments 137-208, wherein [A][B] is present immediately subsequent to position 586, numbered according to SEQ ID NO: 138.
[0810] 210. The isolated AAV particle of any one of embodiments 137-209, wherein [A][B] is present immediately subsequent to position 586 and replaces positions 587 and 588 (e.g., A587 and Q588), numbered according to SEQ ID NO: 138.
[0811] 211. The isolated AAV particle of any one of embodiments 137-210, wherein [A][B] corresponds to positions 587-595 of SEQ ID NO: 5, 8, or 3636.
[0812] 212. The isolated AAV particle of any one of embodiments 149-211, wherein [C] is present immediately subsequent to position 588, relative to a reference sequence numbered according to the amino acid sequence of SEQ ID NO: 138.
[0813] 213. The isolated AAV particle of any one of embodiments 149-212, wherein [C] replaces positions 589-592 (e.g., A589, Q590, A591, Q592), numbered according to the amino acid sequence of SEQ ID NO: 138.
[0814] 214. The isolated AAV particle of any one of embodiments 149-213, wherein [C] is present immediately subsequent to position 588, and replaces positions 589-592 (e.g., A589, Q590, A591, Q592), numbered according to the amino acid sequence of SEQ ID NO: 138.
[0815] 215. The isolated AAV particle of any one of embodiments 149-214, wherein [C] corresponds to positions 596-599 of SEQ ID NO: 5, 8, or 3636.
[0816] 216. The isolated AAV particle of any one of embodiments 149-215, wherein [A][B][C] is present immediately subsequent to position 586, numbered according to SEQ ID NO: 138.
[0817] 217. The isolated AAV particle of any one of embodiments 149-216, wherein [A][B][C] replaces positions 587-592 (e.g., A587, Q588, A589, Q590, A591, Q592), numbered according to SEQ ID NO: 138.
[0818] 218. The isolated AAV particle of any one of embodiments 149-217, wherein [A][B][C] is present immediately subsequent to position 586 and replaces positions 587-592 (e.g., A587, Q588, A589, Q590, A591, Q592), numbered according to SEQ ID NO: 138.
[0819] 219. The isolated AAV particle of any one of embodiments 149-218, wherein [A][B][C] corresponds to positions 587-599 of SEQ ID NO: 5, 8, or 3636.
[0820] 220. The isolated AAV particle of any one of embodiments 165-219, wherein [D] is present immediately subsequent to position 592, relative to a reference sequence numbered according to the amino acid sequence of SEQ ID NO: 138.
[0821] 221. The isolated AAV particle of any one of embodiments 165-220, wherein [D] replaces positions 593-595 (e.g., T593, G594, W595), numbered according to the amino acid sequence of SEQ ID NO: 138.
[0822] 222. The isolated AAV particle of any one of embodiments 165-221, wherein [D] is present immediately subsequent to position 592, and replaces positions 593-595 (e.g., T593, G594, W595), numbered according to the amino acid sequence of SEQ ID NO: 138.
[0823] 223. The isolated AAV particle of any one of embodiments 165-222, wherein [D] corresponds to positions 600-602 of SEQ ID NO: 5, 8, or 3636.
[0824] 224. The isolated AAV particle of any one of embodiments 165-223, wherein [C][D] is present immediately subsequent to position 588, numbered according to SEQ ID NO: 138.
[0825] 225. The isolated AAV particle of any one of embodiments 165-224, wherein [C][D] replaces positions 589-595 (e.g., A589, Q590, A591, Q592, T593, G594, W595), numbered according to the amino acid sequence of SEQ ID NO: 138.
[0826] 226. The isolated AAV particle of any one of embodiments 165-225, wherein [C][D] is present immediately subsequent to 588, and replaces positions 589-595 (e.g., A589, Q590, A591, Q592, T593, G594, W595), numbered according to the amino acid sequence of SEQ ID NO: 138.
[0827] 227. The isolated AAV particle of any one of embodiments 165-226, wherein [C][D] corresponds to positions 596-602 of SEQ ID NO: 5, 8, or 3636.
[0828] 228. The isolated AAV particle of any one of embodiments 165-227, wherein [A][B][C][D] is present immediately subsequent to position 586, numbered according to SEQ ID NO: 5, 8, 138, or 3636.
[0829] 229. The isolated AAV particle of any one of embodiments 165-228, wherein [A][B][C][D] replaces positions 587-595 (e.g., A587, Q588, A589, Q590, A591, Q592, T593, G594, W595), numbered according to SEQ ID NO: 138.
[0830] 230. The isolated AAV particle of any one of embodiments 165-229, wherein [A][B][C][D] is present immediately subsequent to position 586 and replaces positions 587-595 (e.g., A587, Q588, A589, Q590, A591, Q592, T593, G594, W595), numbered according to SEQ ID NO: 138.
[0831] 231. The isolated AAV particle of any one of embodiments 176-230, wherein [A][B][C][D] corresponds to positions 587-602 of SEQ ID NO: 5, 8, or 3636.
[0832] 232. The isolated AAV particle of any one of embodiments 95-231, wherein [E] is present immediately subsequent to position 595, relative to a reference sequence numbered according to the amino acid sequence of SEQ ID NO: 138.
[0833] 233. The isolated AAV particle of any one of embodiments 176-232, wherein [E] replaces positions 596-598 (e.g., V596, Q597, N598), numbered according to the amino acid sequence of SEQ ID NO: 138.
[0834] 234. The isolated AAV particle of any one of embodiments 176-233, wherein [E] is present immediately subsequent to position 595, and replaces positions 596-598 (e.g., V596, Q597, N598), numbered according to the amino acid sequence of SEQ ID NO: 138.
[0835] 235. The isolated AAV particle of any one of embodiments 176-234, wherein [E] corresponds to positions 603 to 605 of SEQ ID NO: 5, 8, or 3636.
[0836] 236. The isolated AAV particle of any one of embodiments 176-235, wherein [A][B][C][D][E] is present immediately subsequent to position 586, relative to a reference sequence numbered according to the amino acid sequence of SEQ ID NO: 5, 8, 138, or 3636.
[0837] 237. The isolated AAV particle of any one of embodiments 176-236, wherein [A][B][C][D][E] replaces positions 587-598 (e.g., A587, Q588, A589, Q590, A591, Q592, T593, G594, W595, V596, Q597, N598), numbered according to SEQ ID NO: 138.
[0838] 238. The isolated AAV particle of any one of embodiments 176-237, wherein [A][B][C][D][E] is present immediately subsequent to position 586 and replaces positions 587-598 (e.g., A587, Q588, A589, Q590, A591, Q592, T593, G594, W595, V596, Q597, N598), numbered according to SEQ ID NO: 138.
[0839] 239. The isolated AAV particle of any one of embodiments 176-238, wherein [A][B][C][D][E] corresponds to positions 587-605 of SEQ ID NO: 5, 8, or 3636.
[0840] 240. The isolated AAV particle of any one of embodiments 137-239, wherein the AAV capsid variant comprises from N-terminus to C-terminus, [A][B].
[0841] 241. The isolated AAV particle of any one of embodiments 149-240, wherein the AAV capsid variant comprises from N-terminus to C-terminus, [A][B][C].
[0842] 242. The isolated AAV particle of any one of embodiments 165-241, wherein the AAV capsid variant comprises from N-terminus to C-terminus, [A][B][C][D].
[0843] 243. The isolated AAV particle of any one of embodiments 176-242, wherein the AAV capsid variant comprises from N-terminus to C-terminus, [A][B][C][D][E].
[0844] 244. An isolated, e.g., recombinant, AAV particle comprising an AAV capsid variant and a nucleic acid comprising a transgene encoding an antibody that binds to human tau (e.g., SEQ ID NO: 1404), wherein the AAV capsid variant comprises PLNGAVHLY (SEQ ID NO: 3648) and optionally wherein the AAV capsid variant further comprises one, two, or all of an amino acid other than T at position 593 (e.g., A, L, R, V, C, I, K, M, N, P, Q, S), an amino acid other than G at position 594 (e.g., M, S, A, Q, V, T, L, P, H, K, N, I, Y, or R), and/or an amino acid other than W at position 595 (e.g., S, P, T, A, G, L, Q, H, N, R, K, V, E, F, M, C, or Y), relative to a reference sequence numbered according to the amino acid sequence of SEQ ID NO: 138.
[0845] 245. The isolated AAV particle of embodiment 244, wherein:
   [0846] (i) the amino acid T, A, L, R, V, C, I, K, M, N, P, Q, or S is present at position 593, r numbered according to the amino acid sequence of SEQ ID NO: 138;
   [0847] (ii) the amino acid G, M, S, A, Q, V, T, L, P, H, K, N, I, Y, or R is present at position 594, numbered according to the amino acid sequence of SEQ ID NO: 138; and/or
   [0848] (iii) the amino acid W, S, P, T, A, G, L, Q, H, N, R, K, V, E, F, M, C, or Y is present at position 595, numbered according to the amino acid sequence of SEQ ID NO: 138.
[0849] 246. An isolated, e.g., recombinant, AAV particle comprising an AAV capsid variant and a nucleic acid comprising a transgene encoding an antibody that binds to human tau (e.g., SEQ ID NO: 1404), wherein the AAV capsid variant comprises an amino sequence comprising the amino acid sequence of PLNGAVHLY (SEQ ID NO: 3648); and which further comprises one, two, three, or all of:
   [0850] (i) the amino acid T, A, L, R, V, C, I, K, M, N, P, Q, or S at position 593 numbered according to SEQ ID NO: 138 or at position 600 numbered according to SEQ ID NO: 5, 8, or 3636;
   [0851] (ii) the amino acid G, M, S, A, Q, V, T, L, P, H, K, N, I, Y, or R at position 594 numbered according to SEQ ID NO: 138 or at position 601 numbered according to SEQ ID NO: 5, 8, or 3636; and/or
   [0852] (iii) the amino acid W, S, P, T, A, G, L, Q, H, N, R, K, V, E, F, M, C, or Y at position 595 numbered according to SEQ ID NO: 138 or at position 602 numbered according to SEQ ID NO: 5, 8, or 3636;
   [0853] optionally, provided that the amino acids at positions 593-595, relative to a reference sequence numbered according to the amino acid sequence of SEQ ID NO: 138, does not comprise the amino acid sequence of TGW.
[0854] 247. The isolated AAV particle of any one of embodiments 244-246, wherein the AAV capsid variant comprises:
   [0855] (i) the amino acid L at position 593 numbered according to SEQ ID NO: 138 or at position 600 numbered according to SEQ ID NO: 5, 8, or 3636;
   [0856] (ii) the amino acid S at position 594 numbered according to SEQ ID NO: 138 or at position 601 numbered according to SEQ ID NO: 5, 8, or 3636; and/or
   [0857] (iii) the amino acid P at position 595 numbered according to SEQ ID NO: 138 or at position 602 numbered according to SEQ ID NO: 5, 8, or 3636.
[0858] 248. The isolated AAV particle of any one of embodiments 244-247, wherein the AAV capsid variant comprises the amino acid sequence of SEQ ID NO: 138, comprise the amino acid sequence of TMS, ASP, LGS, LSS, RST, TAA, TAG, TAL, TAS, TGT, TMA, TQP, TSA, TSP, TST, TVA, TVS, VMS, VSP, VSS, VTP, TGP, VAS, AAA, AAP, AGP, AGW, ALP, AMS, AQP, ATG, ATP, ATQ, ATS, AVG, CSP, CTP, IAA, IAG, IAS, IGG, IGS, IGW, ILG, IPP, IQP, IQS, ISG, ISP, ISS, ITP, KGW, KSS, LAA, LAG, LAH, LAN, LAP, LAQ, LAR, LAS, LAT, LGP, LGQ, LGT, LHP, LKS, LLP, LMA, LMG, LMP, LMQ, LMS, LNP, LPP, LQP, LQQ, LQR, LSA, LSG, LSH, LSK, LSN, LSP, LSQ, LSR, LST, LTA, LTN, LTP, LTS, LVG, MAP, NAL, NAQ, NAS, NLP, NMQ, NQP, NSP, NTP, NTQ, NTT, NVQ, PGW, QAP, QSP, RAA, RAG, RAQ, RAS, RGG, RGS, RGW, RIA, RIG, RIP, RLG, RLP, RLS, RLT, RML, RMS, RNS, RPG, RPP, RQG, RQL, RQP, RQQ, RQS, RSA, RSG, RSP, RSQ, RSS, RSV, RTA, RTG, RTL, RTP, RTQ, RTS, RTT, RVE, RYS, SAA, SAF, SAG, SAK, SAL, SAM, SAN, SAP, SAQ, SAV, SGP, SLP, SMA, SMG, SMQ, SMS, SPP, SQL, SQM, SQP, SQQ, SSL, SSM, SSP, SSR, SSS, STP, STQ, STS, SVA, SVG, SVQ, SVS, TAK, TAM, TAN, TAP, TAQ, TAT, TAV, TAW, TGA, TGC, TGF, TGG, TGL, TGM, TGQ, TGR, TGS, TGV, TGY, TKA, TKP, TKQ, TKS, TLA, TLG, TLP, TLQ, TLR, TLS, TMG, TMK, TMM, TMN, TMP, TMQ, TMT, TNA, TNG, TNQ, TNS, TPA, TPG, TPP, TPQ, TPR, TPS, TPT, TPW, TQA, TQH, TQK, TQL, TQM, TQN, TQQ, TQR, TQT, TQW, TRW, TSG, TSH, TSK, TSL, TSM, TSN, TSQ, TSS, TSV, TSW, TTA, TTG, TTK, TTP, TTQ, TTR, TTS, TTT, TVG, TVQ, TVW, TYA, TYS, VAA, VAG, VAK, VAN, VAQ, VAT, VGG, VGK, VGN, VGS, VHP, VKA, VKP, VKQ, VLG, VLP, VLS, VMA, VMP, VMQ, VNA, VNG, VNS, VPA, VPP, VPQ, VQA, VQG, VQN, VQP, VQQ, VQS, VQT, VRP, VSA, VSG, VSN, VSQ, VSR, VST, VTA, VTG, VTK, VTS, or VAP at positions 593-595 numbered according to SEQ ID NO: 138 or at positions 600-602 numbered according to SEQ ID NO: 5, 8, or 3636.
[0859] 249. The isolated AAV particle of any one of embodiments 244-248, wherein the AAV capsid variant comprises the amino acid sequence LSP at positions 593-595 numbered according to SEQ ID NO: 138 or at positions 600-602 numbered according to SEQ ID NO: 5, 8, or 3636.
[0860] 250. The isolated AAV particle of any one of embodiments 244-249, wherein the AAV capsid variant further comprises one, two, three, or all of an amino acid other than A at position 589 (e.g., D, S, or T), an amino acid other than Q at position 590 (e.g., K, H, L, P, or R), an amino acid other than A at position 591 (e.g., P or E), and/or an amino acid other than Q at position 592 (e.g., H, K, or P).
[0861] 251. The isolated AAV particle of embodiment 250, wherein:
   [0862] (i) the amino acid A, D, S, or T at position 589, numbered according to SEQ ID NO: 138;
   [0863] (ii) the amino acid Q, K, H, L, P, or R at position 590, numbered according to SEQ ID NO: 138;
   [0864] (iii) the amino acid A, E, or P at position 591, numbered according to SEQ ID NO: 138; and/or
   [0865] (iv) the amino acid Q, H, K, or P at position 592, numbered according to SEQ ID NO: 138.
[0866] 252. The isolated AAV particle of embodiment 250 or 251, wherein the AAV capsid variant comprises the amino acid sequence of:
   [0867] (i) AHAQ (SEQ ID NO: 4742), AKAQ (SEQ ID NO: 4741), ALAQ (SEQ ID NO: 4749), APAQ (SEQ ID NO: 4745), AQAH (SEQ ID NO: 4747), AQAK (SEQ ID NO: 4746), AQAP (SEQ ID NO: 4743), AQAQ (SEQ ID NO: 4737), AQEQ (SEQ ID NO: 4748), AQPQ (SEQ ID NO: 4739), ARAQ (SEQ ID NO: 4750), DQAQ (SEQ ID NO: 4744), SQAQ (SEQ ID NO: 4738), or TQAQ (SEQ ID NO: 4751) at positions 589-592 numbered according to SEQ ID NO: 138 or at positions 596-599 numbered according to SEQ ID NO: 5, 8, or 3636; or
   [0868] (ii) AKAQ (SEQ ID NO: 4741), AQAQ (SEQ ID NO: 4737), AQPQ (SEQ ID NO: 4739), DQAQ (SEQ ID NO: 4744), or SQAQ (SEQ ID NO: 4738) at positions 589-592 numbered according to SEQ ID NO: 138 or at positions 596-599 numbered according to SEQ ID NO: 5, 8, or 3636.
[0869] 253. The isolated AAV particle of any one of embodiments 244-252, wherein the AAV capsid variant further comprises one, two, or all of an amino acid other than V at position 596 (e.g., G, F, D, L, A, I, or E), an amino acid other than Q at position 597 (e.g., K, R, H, E, L, or P), and/or an amino acid other than N at position 598 (e.g., H, K, T, I, S, D, P, or Y), relative to a reference sequence numbered according to the amino acid sequence of SEQ ID NO: 138.
[0870] 254. The isolated AAV particle of any one of embodiments 253, wherein:
   [0871] (i) the amino acid V, G, F, D, L, A, I, or E at position 596 numbered according to SEQ ID NO: 138 or at position 603 numbered according to SEQ ID NO: 5, 8, or 3636;
   [0872] (ii) the amino acid Q, K, R, H, E, L, or P at position 597, numbered according to SEQ ID NO: 138 or at position 604 numbered according to SEQ ID NO: 5, 8, or 3636; and/or
   [0873] (iii) the amino acid N, H, K, T, I, S, D, P, or Y at position 598 numbered according to SEQ ID NO: 138 or at position 605 numbered according to SEQ ID NO: 5, 8, or 3636.
[0874] 255. An isolated, e.g., recombinant, AAV particle comprising an AAV capsid variant and a nucleic acid comprising a transgene encoding an antibody that binds to human tau (e.g., SEQ ID NO: 1404), wherein the AAV capsid variant comprises PLNGAVHLY (SEQ ID NO: 3648), and optionally wherein the AAV capsid variant further comprises one, two, or all of an amino acid other than V at position 596 (e.g., G, F, D, L, A, I, or E), an amino acid other than Q at position 597 (e.g., K, R, H, E, L, or P), and/or an amino acid other than N at position 598 (e.g., H, K, T, I, S, D, P, or Y), numbered according to SEQ ID NO: 138.
[0875] 256. An isolated, e.g., recombinant, AAV particle comprising an AAV capsid variant and a nucleic acid comprising a transgene encoding an antibody that binds to human tau (e.g., SEQ ID NO: 1404), wherein the AAV capsid variant comprises PLNGAVHLY (SEQ ID NO: 3648), and further comprising one, two, or all of:
   [0876] (i) V, G, F, D, L, A, I, or E at position 596 numbered according to SEQ ID NO: 138 or at position 603 numbered according to SEQ ID NO: 5, 8, or 3636;
   [0877] (ii) Q, K, R, H, E, L, or P at position 597 numbered according to SEQ ID NO: 138 or at position 604 numbered according to SEQ ID NO: 5, 8, or 3636; and/or
   [0878] (iii) N, H, K, T, I, S, D, P, or Y at position 598 numbered according to SEQ ID NO: 138 or at position 605 numbered according to SEQ ID NO: 5, 8, or 3636;
   [0879] optionally, provided that the amino acids at positions 596-598 numbered according to the amino acid sequence of SEQ ID NO: 138 or positions 603-605 of SEQ ID NO: 5, 8, or 3636, does not comprise the amino acid sequence of VQN.
[0880] 257. The isolated AAV particle of any one of embodiments 244-256, which comprises the amino acid P at position 597 numbered according to SEQ ID NO: 138 or at position 604 numbered according to SEQ ID NO: 5, 8, or 3636.
[0881] 258. The isolated AAV particle of any one of embodiments 244-257, which comprises the amino acid K at position 597 numbered according to SEQ ID NO: 138 or at position 604 numbered according to SEQ ID NO: 5, 8, or 3636.
[0882] 259. The isolated AAV particle of any one of embodiments 253-258, wherein the AAV capsid variant comprises the amino acid sequence of:
   [0883] (i) GQN, VQH, VQK, VQT, VQN, FQN, VKN, VQI, DQN, LQN, VQS, VRN, AQN, IQN, VHN, VLN, VEN, VQD, DKN, EQN, FQK, GHN, GQT, VKK, VKT, VPH, VPN, VQP, or VQY at positions 596-598 numbered according to SEQ ID NO: 138 or positions 603-605 numbered according to SEQ ID NO: 5, 8, or 3636; or
   [0884] (ii) VQN, VQT, VQK, DQN, VQH, FQN, AQN, VLN, LQN, VQI, VQS, EQN, GQT, VPN, VQD, VQP, VRN, or VKN at positions 596-598 numbered according to SEQ ID NO: 138 or positions 603-605 numbered according to SEQ ID NO: 5, 8, or 3636.
[0885] 260. The isolated AAV particle of any one of embodiments 253-259, which comprises the amino acid sequence of VKN, VPN, or VQN at positions 596-598 numbered according to SEQ ID NO: 138 or positions 603-605 numbered according to SEQ ID NO: 5, 8, or 3636.
[0886] 261. The isolated AAV particle of any one of embodiments 253-260, which comprises the amino acid sequence of VEN or VHN at positions 596-598 numbered according to SEQ ID NO: 138 or positions 603-605 numbered according to SEQ ID NO: 5, 8, or 363.
[0887] 262. The isolated AAV particle of any one of embodiments 244-261, wherein the AAV capsid variant comprises:
   [0888] (i) the amino acid sequence of any of SEQ ID NOs: 143, 148, 149, 151, 153-158, 160-163, 166, 168, 170, 171, 173-175, 177-179, 181, 182, 184-188, 191-197, 199-210, 212-215, 217-225, 227-231, 233, 234, 236-240, 243-262, 265, 267, 268, 270-277, 279, 282, 284, 285, 286, 288-293, 295, 296, 298, 300-314, 316-318, 320-327, 329, 331, 332, 334, 336-344, 346-350, 352-354, 356-367, 369, 371-380, 382-385, 387, 392-394, 396, 397, 399-401, 404-411, 413-415, 417, 419-429, 432, 433, 435-437, 438, 440-442, 444-447, 450-453, 456, 458-461, 464, 465, 467-469, 471-478, 480-483, 487-495, 497, 498, 500-503, 505, 507-512, 515-517, 522-525, 528-532, 534-539, 542-545, 547, 551-554, 558-561, 563-568, 570, 573, 574, 576, 579, 581, 582, 584, 586, 587, 592-596, 598, 601, 604-607, 610, 612, 614-619, 624-629, 631, 633-636, 640, 641, 645, 646, 649, 650, 658, 663, 664, 666, 668, 669, 672, 673, 675, 679, 683, 684, 686, 688, 689, 691, 693, 695, 697, 699, 700, 704, 705, 709-712, 720, 722, 726-731, 733, 736, 740, 745, 749, 750-752, 754, 755, 757, 758, 760-765, 767, 768, 771, 778, 780, 783-787, 792, 794, 797, 799-802, 804, 817, 818, 821, 824, 828, 831, 832, 834-837, 840-845, 847, 848, 851-853, 855, 858, 861, 862, 865, 869, 870-872, 874, 876, 882, 883, 887, 889, 890, 892-895, 897, 901, 903, 904, 905, 907, 910, 911, 913, 915, 919, 920, 923, 924, 926, 927, 929, 931-933, 935, 937, 940, 941, 943, 945-949, 953, 955, 957, 958, 960, 962, 964, 965, 971, 973, 974, 977, 986, 988, 989, 992, 994, 997, 998, 1000, 1004, 1007, 1013, 1015, 1017, 1018, 1020, 1025, 1027, 1029, 1030, 1031, 1033-1035, 1037-1039, 1043, 1046, 1049, 1052, 1056, 1057, 1059, 1062, 1065, 1067, 1068, 1070, 1073, 1075, 1077-1079, 1083-1087, 1089, 1090, 1094, 1100, 1101, 1103, 1106, 1107, 1110, 1111, 1112, 1114, 1115, 1117, 1119, 1125, 1126, 1129, 1132, or 1133;
   [0889] (ii) an amino acid sequence comprising any portion of an amino acid sequence in (i), e.g., any 2, 3, 4, 5, 6, 7, 8, 9, 10, 11, 12, 13, 14, 15, 16, 17, or 18 amino acids, e.g., consecutive amino acids, thereof;
   [0890] (iii) an amino acid sequence comprising at least one, two, or three but no more than four modifications, e.g., substitutions (e.g., conservative substitutions), insertions, or deletions, relative to any of the amino acid sequences in (i); or
   [0891] (iv) an amino acid sequence comprising at least one, two, or three but no more than four different amino acids, relative to any one of the amino acid sequences in (i).
[0892] 263. The isolated AAV particle of any one of embodiments 244-262, wherein the AAV capsid variant comprises:
   [0893] (i) the amino acid sequence of any of SEQ ID NOs: 143, 148-151, 153-158, 160-163, 166, 168, 170, 171, 173-175, 177-179, 181, 182, 184-188, 191-197, 199-210, 212-215, 217-225, 227-231, 233, 234, 236-240, 243-262, 265, 267, 268, 270-277, 279, 282, 284-286, 288-293, 295, 296, 298, 300-314, 316-318, 320-327, 329, 331, 332, 334, 336, 337-339, 340-344, 346-350, 352-354, 356-365, 367, 369, 371-380, 382-385, 387, 392-394, 396, 397, 399-401, 404-411, 413-415, 417, 419, 420-429, 432, 433, 435-438, 440-442, 444-447, 450-453, 456, 458, 459, 460, 461, 464, 465, 467-469, or 471-476;
   [0894] (ii) an amino acid sequence comprising any portion of an amino acid sequence in (i), e.g., any 2, 3, 4, 5, 6, 7, 8, 9, 10, 11, 12, 13, 14, 15, 16, 17, or 18 amino acids, e.g., consecutive amino acids, thereof;
   [0895] (iii) an amino acid sequence comprising at least one, two, or three but no more than four modifications, e.g., substitutions (e.g., conservative substitutions), insertions, or deletions, relative to any of the amino acid sequences in (i); or
   [0896] (iv) an amino acid sequence comprising at least one, two, or three but no more than four different amino acids, relative to any one of the amino acid sequences in (i).
[0897] 264. The isolated AAV particle of any one of embodiments 244-263, wherein the amino acid sequence of PLNGAVHLY (SEQ ID NO: 3648) is present in loop VIII.
[0898] 265. The isolated AAV particle of any one of embodiments 244-264, wherein the amino acid sequence of PLNGAVHLY (SEQ ID NO: 3648) is present immediately subsequent to position 586, relative to a reference sequence numbered according to the amino acid sequence of SEQ ID NO: 138.
[0899] 266. The isolated AAV particle of any one of embodiments 244-265, wherein the amino acid sequence of PLNGAVHLY (SEQ ID NO: 3648) replaces positions 587 and 588 (e.g., A587 and Q588), numbered according to SEQ ID NO: 138.
[0900] 267. The isolated AAV particle of any one of embodiments 244-266, wherein the amino acid sequence of PLNGAVHLY (SEQ ID NO: 3648) is present immediately subsequent to position 586 and replaces positions 587 and 588 (e.g., A587 and Q588), numbered according to SEQ ID NO: 138.
[0901] 268. The isolated AAV particle of any one of embodiments 244-267, wherein the amino acid sequence of PLNGAVHLY (SEQ ID NO: 3648) corresponds to positions 587-595 of SEQ ID NO: 5, 8, or 3636.
[0902] 269. An isolated, e.g., recombinant, AAV particle comprising an AAV capsid variant and a nucleic acid comprising a transgene encoding an antibody that binds to human tau (e.g., SEQ ID NO: 1404), wherein the AAV capsid variant comprises X1-X2-X3-X4-X5-X6-X7-X8-X9-X10-X11-X12-X13-X14-X15-X16-X17-X18-X19, wherein:
   [0903] (i) X1 is: P, A, D, E, F, G, H, K, L, N, Q, R, S, T, or V;
   [0904] (ii) X2 is: L, D, E, F, H, I, M, N, P, Q, R, S, or V;
   [0905] (iii) X3 is: N, A, D, E, G, H, I, K, Q, S, T, V, or Y;
   [0906] (iv) X4 is: G, A, C, D, E, P, Q, R, S, T, V, or W;
   [0907] (v) X5 is: A, C, D, E, F, G, H, I, K, N, P, Q, R, S, T, V, W, or Y;
   [0908] (vi) X6 is: V, A, C, D, E, F, G, H, I, K, L, M, N, Q, R, S, T, or Y;
   [0909] (vii) X7 is: H, A, D, E, G, I, K, L, M, N, P, Q, R, S, T, V, or Y;
   [0910] (viii) X8 is: L, A, D, E, F, G, H, I, K, M, N, P, Q, R, S, T, V, or Y;
   [0911] (ix) X9 is: Y, A, C, D, E, F, G, H, I, K, L, M, N, Q, R, S, T, V, or W;
   [0912] (x) X10 is: A, C, D, E, F, G, H, I, K, L, N, P, Q, R, S, T, V, or; Y;
   [0913] (xi) X11 is: Q, A, D, E, H, K, L, P, R, or T;
   [0914] (xii) X12 is: A, D, E, G, H, L, N, P, Q, R, S, T, or V;
   [0915] (xiii) X13 is: Q, E, H, K, L, P, R, or T;
   [0916] (xiv) X14 is: T, A, C, D, E, F, G, H, I, K, L, M, N, P, Q, R, S, V, W, or Y;
   [0917] (xv) X15 is: G, A, C, D, E, F, H, I, K, L, M, N, P, Q, R, S, T, V, W, or Y;
   [0918] (xvi) X16 is: W, A, C, D, E, F, G, H, I, K, L, M, N, P, Q, R, S, T, V, or Y;
   [0919] (xvii) X17 is: V, A, D, E, F, G, H, I, or L;
   [0920] (xviii) X18 is: Q, E, H, K, L, P, or R; and/or
   [0921] (xix) X19 is: N, D, H, I, K, P, S, T, or Y.
[0922] 270. The isolated AAV particle of embodiment 269, wherein:
   [0923] (i) X1 is: P, Q, A, S, T, R, H, L, or K;
   [0924] (ii) X2 is: L, I, V, H, or R;
   [0925] (iii) X3 is: N, D, K, Y, or I;
   [0926] (iv) X4 is: G, S, R, C, or A;
   [0927] (v) X5 is: A, S, G, N, T, D, Y, Q, V, or C;
   [0928] (vi) X6 is: V, I, L, A, F, D, or G;
   [0929] (vii) X7 is: H, N, Q, P, D, L, R, or Y;
   [0930] (viii) X8 is: L, H, V, I, or R;
   [0931] (ix) X9 is Y;
   [0932] (x) X10 is: A, D, S, or T;
   [0933] (xi) X11 is: Q, K, H, L, P, or R;
   [0934] (xii) X12 is: A, P, E, or S;
   [0935] (xiii) X13 is: Q, K, H, or P;
   [0936] (xiv) X14 is: L, T, V, S, R, I, A, N, C, P, Q, M, or K;
   [0937] (xv) X15 is: S, G, M, T, A, K, Q, V, I, R, N, P, L, H, Y;
   [0938] (xvi) X16 is: P, W, S, K, Q, G, C, R, A, N, T, V, M, H, L, E, F, or Y;
   [0939] (xvii) X17 is: V, D, F, A, E, L, G, or I;
   [0940] (xviii) X18 is: Q, R, P, K, L, H, or E; and/or
   [0941] (xix) X19 is: N, H, D, S, T, P, K, I, or Y.
[0942] 271. The isolated AAV particle of embodiment 269 or 270, wherein:
   [0943] (i) X1 is: P, A, S, Q, or T;
   [0944] (ii) X2 is L or I;
   [0945] (iii) X3 is N or D;
   [0946] (iv) X4 is G or S;
   [0947] (v) X5 is: A, S, G, N, or T;
   [0948] (vi) X6 is V;
   [0949] (vii) X7 is H;
   [0950] (viii) X8 is: L, H, V, or I
   [0951] (ix) X9 is Y;
   [0952] (x) X10 is: A, D, or S;
   [0953] (xi) X11 is Q or K;
   [0954] (xii) X12 is A or P;
   [0955] (xiii) X13 is Q;
   [0956] (xiv) X14 is: L, T, V, S, R, I, A, N, C, P, Q, or M;
   [0957] (xv) X15 is: S, G, M, T, A, K, Q, V, I, R, N, P, L, or H;
   [0958] (xvi) X16 is: P, W, S, K, Q, G, C, R, A, N, T, V, M, H, L, or E;
   [0959] (xvii) X17 is: V, D, F, A, E, L, or G;
   [0960] (xviii) X18 is: Q, R, P, K, or L; and/or
   [0961] (xix) X19 is: N, H, D, S, T, P, K, or I.
[0962] 272. The isolated AAV particle of any one of embodiments 269-271, wherein X1-X2-X3-X4-X5-X6-X7-X8-X9-X10-X11-X12-X13-X14-X15-X16-X17-X18-X19 is present immediately subsequent to position 586, numbered according to SEQ ID NO: 5, 8, 138, or 3636.
[0963] 273. The isolated AAV particle of any one of embodiments 269-272, wherein X1-X2-X3-X4-X5-X6-X7-X8-X9-X10-X11-X12-X13-X14-X15-X16-X17-X18-X19 replaces positions 587-598 (e.g., A587, Q588, A589, Q590, A591, Q592, T593, G594, W595, V596, Q597, N598), numbered according to SEQ ID NO: 138.
[0964] 274. The isolated AAV particle of any one of embodiments 269-273, wherein X1-X2-X3-X4-X5-X6-X7-X8-X9-X10-X11-X12-X13-X14-X15-X16-X17-X18-X19 is present immediately subsequent to position 586 and replaces positions 587-598 (e.g., A587, Q588, A589, Q590, A591, Q592, T593, G594, W595, V596, Q597, N598), numbered according to SEQ ID NO: 138.
[0965] 275. The isolated AAV particle of any one of embodiments 269-274, wherein X1-X2-X3-X4-X5-X6-X7-X8-X9-X10-X11-X12-X13-X14-X15-X16-X17-X18-X19 corresponds to positions 587-605 of SEQ ID NO: 5, 8, or 3636.
[0966] 276. An isolated, e.g., recombinant, AAV particle comprising an AAV capsid variant and a nucleic acid comprising a transgene encoding an antibody that binds to human tau (e.g., SEQ ID NO: 1404), wherein the AAV capsid variant comprises:
   [0967] (a) the amino acid sequence of any one of SEQ ID NOs: 139-1138;
   [0968] (b) an amino acid sequence comprising at least 3, 4, 5, 6, 7, 8, 9, 10, 11, 12, 13, 14, 15, 16, 17, or 18 consecutive amino acids from any one of SEQ ID NOs: 139-1138; or
   [0969] (c) an amino acid sequence comprising at least one, two, or three but no more than four different amino acids, relative to the amino acid sequence of any one of SEQ ID NOs: 139-1138;
   [0970] (d) an amino sequence comprising at least one, two, or three but no more than four modifications, e.g., substitutions (e.g., conservative substitutions), insertions, or deletions, relative to the amino acid sequence of any one of SEQ ID NOs: 139-1138;
   [0971] optionally wherein the AAV capsid variant does not comprise the amino acid sequence of TGW at positions 593-595, relative to a reference sequence numbered according to the amino acid sequence of SEQ ID NO: 138.
[0972] 277. An isolated, e.g., recombinant, AAV particle comprising an AAV capsid variant and a nucleic acid comprising a transgene encoding an antibody that binds to human tau (e.g., SEQ ID NO: 1404), wherein the AAV capsid variant comprises:
   [0973] (a) the amino acid sequence of any one of SEQ ID NOs: 139-476;
   [0974] (b) an amino acid sequence comprising at least 3, 4, 5, 6, 7, 8, 9, 10, 11, 12, 13, 14, 15, 16, 17, or 18 consecutive amino acids from any one of SEQ ID NOs: 139-476; or
   [0975] (c) an amino acid sequence comprising at least one, two, or three but no more than four different amino acids, relative to the amino acid sequence of any one of SEQ ID NOs: 139-476;
   [0976] (d) an amino sequence comprising at least one, two, or three but no more than four modifications, e.g., substitutions (e.g., conservative substitutions), insertions, or deletions, relative to the amino acid sequence of any one of SEQ ID NOs: 139-476;
   [0977] optionally wherein the AAV capsid variant does not comprise the amino acid sequence of TGW at positions 593-595, relative to a reference sequence numbered according to the amino acid sequence of SEQ ID NO: 138.
[0978] 278. An isolated, e.g., recombinant, AAV particle comprising an AAV capsid variant and a nucleic acid comprising a transgene encoding an antibody that binds to human tau (e.g., SEQ ID NO: 1404), or a fragment thereof, wherein the AAV capsid variant comprises:
   [0979] (a) the amino acid sequence of any one of SEQ ID NOs: 140, 142-144, 148-150, 154-158, 160, 161, 163, 165, 166, 168, 170, 171, 173-175, 177-179, 181, 182, 184-197, 199-214, 218-222, 224, 225, 227-241, 243-253, 255-262, 265, 267, 268, 270, 271, 273, 274, 276, 277, 279, 282, 284-286, 288-296, 300-310, 312, 315, 317, 318, 320-323, 326, 327, 331, 332, 334, 336, 337, 339, 340, 341, 343, 344, 346, 349, 351, 352, 356-363, 365-367, 369, 370, 372-376, 378-381, 383-389, 392, 393, 395, 397-400, 404, 407, 408, 411, 412, 415, 417, 420-430, 432, 433, 435-438, 441, 442, 446-448, 451-453, 456, 458, 460, 461, 465, 467-469, 471-473, 475, 476, 478, 480, 482, 485, 488, 490, 492, 493, 495, 498, 500-503, 505, 507, 509, 510, 517, 522-526, 528, 535-538, 540, 543-545, 547, 551, 552, 557, 559, 561, 564, 568, 570, 572-574, 577, 585-588, 592-594, 596, 601, 602, 605, 612, 616, 619, 622, 624, 627, 628, 635, 640, 641, 646, 658, 660, 665, 666, 675, 678, 680, 683, 684, 689, 693, 695, 707, 711, 718, 719, 724, 727, 735, 740, 748, 751, 755, 758, 759, 765, 766, 768, 778, 783, 787, 791, 797, 801, 804, 817, 821, 832, 841, 852, 856, 861, 862, 864, 894, 906, 911, 913, 924, 929, 945, 959, 961, 970, 975, 980, 983, 988, 992, 1009, 1015, 1019, 1027, 1032, 1036, 1038, 1047, 1051, 1061, 1077, 1081, 1095, or 1113;
   [0980] (b) an amino acid sequence comprising at least 3, 4, 5, 6, 7, 8, 9, 10, 11, 12, 13, 14, 15, 16, 17, or 18 consecutive amino acids from any one of the amino acid sequences in (i); or
   [0981] (c) an amino acid sequence comprising at least one, two, or three but no more than four different amino acids, relative to the amino acid sequence of any one of the amino acid sequences in (i);
   [0982] (d) an amino sequence comprising at least one, two, or three but no more than four modifications, e.g., substitutions (e.g., conservative substitutions), insertions, or deletions, relative to the amino acid sequence of any one of the amino acid sequences in (i);
   [0983] optionally wherein the AAV capsid variant does not comprise the amino acid sequence of TGW at positions 593-595, relative to a reference sequence numbered according to the amino acid sequence of SEQ ID NO: 138.
[0984] 279. The isolated AAV particle of embodiment 276, wherein the AAV capsid variant comprises an amino acid sequence comprising at least 4, 5, 6, 7, 8, 9, 10, 11, 12, 13, 14, 15, 16, 17, or 18 consecutive amino acids from any one of SEQ ID NOs: 139-1138.
[0985] 280. The isolated AAV particle of any one of embodiments 276, 277, or 279, wherein the AAV capsid variant comprises an amino acid sequence comprising at least 4, 5, 6, 7, 8, 9, 10, 11, 12, 13, 14, 15, 16, 17, or 18 consecutive amino acids from SEQ ID NO: 314.
[0986] 281. The isolated AAV particle of any one of embodiments 276 or 279, wherein the AAV capsid variant comprises an amino acid sequence comprising at least 4, 5, 6, 7, 8, 9, 10, 11, 12, 13, 14, 15, 16, 17, or 18 consecutive amino acids from SEQ ID NO: 566.
[0987] 282. The isolated AAV particle of embodiment 276 or 277, comprising an amino acid sequence comprising at least 4, 5, 6, 7, 8, 9, 10, 11, 12, 13, 14, 15, 16, 17, or 18 consecutive amino acids from any one of SEQ ID NOs: 139-476.
[0988] 283. The isolated AAV particle of embodiment 276 or 278, wherein the AAV capsid variant comprises an amino acid sequence comprising at least 4, 5, 6, 7, 8, 9, 10, 11, 12, 13, 14, 15, 16, 17, or 18 consecutive amino acids from any one of SEQ ID NOs: 140, 142-144, 148-150, 154-158, 160, 161, 163, 165, 166, 168, 170, 171, 173-175, 177-179, 181, 182, 184-197, 199-214, 218-222, 224, 225, 227-241, 243-253, 255-262, 265, 267, 268, 270, 271, 273, 274, 276, 277, 279, 282, 284-286, 288-296, 300-310, 312, 315, 317, 318, 320-323, 326, 327, 331, 332, 334, 336, 337, 339, 340, 341, 343, 344, 346, 349, 351, 352, 356-363, 365-367, 369, 370, 372-376, 378-381, 383-389, 392, 393, 395, 397-400, 404, 407, 408, 411, 412, 415, 417, 420-430, 432, 433, 435-438, 441, 442, 446-448, 451-453, 456, 458, 460, 461, 465, 467-469, 471-473, 475, 476, 478, 480, 482, 485, 488, 490, 492, 493, 495, 498, 500-503, 505, 507, 509, 510, 517, 522-526, 528, 535-538, 540, 543-545, 547, 551, 552, 557, 559, 561, 564, 568, 570, 572-574, 577, 585-588, 592-594, 596, 601, 602, 605, 612, 616, 619, 622, 624, 627, 628, 635, 640, 641, 646, 658, 660, 665, 666, 675, 678, 680, 683, 684, 689, 693, 695, 707, 711, 718, 719, 724, 727, 735, 740, 748, 751, 755, 758, 759, 765, 766, 768, 778, 783, 787, 791, 797, 801, 804, 817, 821, 832, 841, 852, 856, 861, 862, 864, 894, 906, 911, 913, 924, 929, 945, 959, 961, 970, 975, 980, 983, 988, 992, 1009, 1015, 1019, 1027, 1032, 1036, 1038, 1047, 1051, 1061, 1077, 1081, 1095, 1113.
[0989] 284. The isolated AAV particle of embodiment 276, wherein the AAV capsid variant comprises an amino acid sequence comprising at least one, two, or three but no more than four different amino acids relative to the amino acid sequence of any one of SEQ ID NOs: 139-1138.
[0990] 285. The isolated AAV particle of embodiment 276 or 277, wherein the AAV capsid variant comprises an amino acid sequence comprising at least one, two, or three but no more than four different amino acids relative to the amino acid sequence of any one of SEQ ID NOs: 139-476.
[0991] 286. The isolated AAV particle of embodiment 276 or 278, wherein the AAV capsid variant comprises an amino acid sequence comprising at least one, two, or three but no more than four different amino acids relative to the amino acid sequence of any one of SEQ ID NOs: 140, 142-144, 148-150, 154-158, 160, 161, 163, 165, 166, 168, 170, 171, 173-175, 177-179, 181, 182, 184-197, 199-214, 218-222, 224, 225, 227-241, 243-253, 255-262, 265, 267, 268, 270, 271, 273, 274, 276, 277, 279, 282, 284-286, 288-296, 300-310, 312, 315, 317, 318, 320-323, 326, 327, 331, 332, 334, 336, 337, 339, 340, 341, 343, 344, 346, 349, 351, 352, 356-363, 365-367, 369, 370, 372-376, 378-381, 383-389, 392, 393, 395, 397-400, 404, 407, 408, 411, 412, 415, 417, 420-430, 432, 433, 435-438, 441, 442, 446-448, 451-453, 456, 458, 460, 461, 465, 467-469, 471-473, 475, 476, 478, 480, 482, 485, 488, 490, 492, 493, 495, 498, 500-503, 505, 507, 509, 510, 517, 522-526, 528, 535-538, 540, 543-545, 547, 551, 552, 557, 559, 561, 564, 568, 570, 572-574, 577, 585-588, 592-594, 596, 601, 602, 605, 612, 616, 619, 622, 624, 627, 628, 635, 640, 641, 646, 658, 660, 665, 666, 675, 678, 680, 683, 684, 689, 693, 695, 707, 711, 718, 719, 724, 727, 735, 740, 748, 751, 755, 758, 759, 765, 766, 768, 778, 783, 787, 791, 797, 801, 804, 817, 821, 832, 841, 852, 856, 861, 862, 864, 894, 906, 911, 913, 924, 929, 945, 959, 961, 970, 975, 980, 983, 988, 992, 1009, 1015, 1019, 1027, 1032, 1036, 1038, 1047, 1051, 1061, 1077, 1081, 1095, or 1113.
[0992] 287. The isolated AAV particle of embodiment 276, wherein the AAV capsid variant comprises an amino acid sequence comprising at least one, two, or three but no more than four modifications, e.g., substitutions (e.g., conservative substitutions), insertions, or deletions, relative to the amino acid sequence of SEQ ID NOs: 139-1138.
[0993] 288. The isolated AAV particle of embodiment 276 or 277, wherein the AAV capsid variant comprises an amino acid sequence comprising at least one, two, or three but no more than four modifications, e.g., substitutions (e.g., conservative substitutions), insertions, or deletions, relative to the amino acid sequence of SEQ ID NOs: 139-476. 289. The isolated AAV particle of any one of embodiments 276, 277, 279, 280, 288, wherein the AAV capsid variant comprises:
   [0994] (i) an amino acid sequence comprising at least one, two, or three but no more than four different amino acids relative to the amino acid sequence of SEQ ID NO: 314; or
   [0995] (ii) an amino acid sequence comprising at least one, two, or three but no more than four modifications, e.g., substitutions (e.g., conservative substitutions), insertions, or deletions, relative to SEQ ID NO: 314.
[0996] 290. The isolated AAV particle of any one of embodiments 276, 279, 281, or 288, wherein the AAV capsid variant comprises:
   [0997] (i) an amino acid sequence comprising at least one, two, or three but no more than four different amino acids relative to the amino acid sequence of SEQ ID NO: 566; or
   [0998] (ii) an amino acid sequence comprising at least one, two, or three but no more than four modifications, e.g., substitutions (e.g., conservative substitutions), insertions, or deletions, relative to SEQ ID NO: 566.
[0999] 291. The isolated AAV particle of embodiment 276 or 278, wherein the AAV capsid variant comprises an amino acid sequence comprising at least one, two, or three but no more than four modifications, e.g., substitutions (e.g., conservative substitutions), insertions, or deletions, relative to any of SEQ ID NOs: 140, 142-144, 148-150, 154-158, 160, 161, 163, 165, 166, 168, 170, 171, 173-175, 177-179, 181, 182, 184-197, 199-214, 218-222, 224, 225, 227-241, 243-253, 255-262, 265, 267, 268, 270, 271, 273, 274, 276, 277, 279, 282, 284-286, 288-296, 300-310, 312, 315, 317, 318, 320-323, 326, 327, 331, 332, 334, 336, 337, 339, 340, 341, 343, 344, 346, 349, 351, 352, 356-363, 365-367, 369, 370, 372-376, 378-381, 383-389, 392, 393, 395, 397-400, 404, 407, 408, 411, 412, 415, 417, 420-430, 432, 433, 435-438, 441, 442, 446-448, 451-453, 456, 458, 460, 461, 465, 467-469, 471-473, 475, 476, 478, 480, 482, 485, 488, 490, 492, 493, 495, 498, 500-503, 505, 507, 509, 510, 517, 522-526, 528, 535-538, 540, 543-545, 547, 551, 552, 557, 559, 561, 564, 568, 570, 572-574, 577, 585-588, 592-594, 596, 601, 602, 605, 612, 616, 619, 622, 624, 627, 628, 635, 640, 641, 646, 658, 660, 665, 666, 675, 678, 680, 683, 684, 689, 693, 695, 707, 711, 718, 719, 724, 727, 735, 740, 748, 751, 755, 758, 759, 765, 766, 768, 778, 783, 787, 791, 797, 801, 804, 817, 821, 832, 841, 852, 856, 861, 862, 864, 894, 906, 911, 913, 924, 929, 945, 959, 961, 970, 975, 980, 983, 988, 992, 1009, 1015, 1019, 1027, 1032, 1036, 1038, 1047, 1051, 1061, 1077, 1081, 1095, or 1113.
[1000] 292. The isolated AAV particle of any one of embodiments 276-291, wherein 4, 5, 6, 7, 8, or 9 consecutive amino acids is not PLNG (SEQ ID NO: 3678), PLNGA (SEQ ID NO: 3679), PLNGAV (SEQ ID NO: 3680), PLNGAVHL (SEQ ID NO: 3682), and/or PLNGAVHLY (SEQ ID NO: 3648).
[1001] 293. The isolated AAV particle of any one of embodiments 276, 279, 284, or 287, wherein the AAV capsid variant comprises the amino acid sequence of any one of SEQ ID NOs: 139-1138.
[1002] 294. The isolated AAV particle of any one of embodiments 276, 279, 280, 284, or 287, wherein the AAV capsid variant comprises the amino acid sequence of SEQ ID NO: 314.
[1003] 295. The isolated AAV particle of any one of embodiments 276, 279, 281, 284, or 287, wherein the AAV capsid variant comprises the amino acid sequence of SEQ ID NO: 566.
[1004] 296. The isolated AAV particle of any one of embodiments 276, 277, 280, 282, 284, 285, 287, or 288, wherein the AAV capsid variant comprises the amino acid sequence of any one of SEQ ID NOs: 139-476.
[1005] 297. The isolated AAV particle of any one of embodiments 276, 277, 280, 283, 284, 286, 287, or 289, wherein the AAV capsid variant comprises the amino acid sequence of any one of SEQ ID NOs: 140, 142-144, 148-150, 154-158, 160, 161, 163, 165, 166, 168, 170, 171, 173-175, 177-179, 181, 182, 184-197, 199-214, 218-222, 224, 225, 227-241, 243-253, 255-262, 265, 267, 268, 270, 271, 273, 274, 276, 277, 279, 282, 284-286, 288-296, 300-310, 312, 315, 317, 318, 320-323, 326, 327, 331, 332, 334, 336, 337, 339, 340, 341, 343, 344, 346, 349, 351, 352, 356-363, 365-367, 369, 370, 372-376, 378-381, 383-389, 392, 393, 395, 397-400, 404, 407, 408, 411, 412, 415, 417, 420-430, 432, 433, 435-438, 441, 442, 446-448, 451-453, 456, 458, 460, 461, 465, 467-469, 471-473, 475, 476, 478, 480, 482, 485, 488, 490, 492, 493, 495, 498, 500-503, 505, 507, 509, 510, 517, 522-526, 528, 535-538, 540, 543-545, 547, 551, 552, 557, 559, 561, 564, 568, 570, 572-574, 577, 585-588, 592-594, 596, 601, 602, 605, 612, 616, 619, 622, 624, 627, 628, 635, 640, 641, 646, 658, 660, 665, 666, 675, 678, 680, 683, 684, 689, 693, 695, 707, 711, 718, 719, 724, 727, 735, 740, 748, 751, 755, 758, 759, 765, 766, 768, 778, 783, 787, 791, 797, 801, 804, 817, 821, 832, 841, 852, 856, 861, 862, 864, 894, 906, 911, 913, 924, 929, 945, 959, 961, 970, 975, 980, 983, 988, 992, 1009, 1015, 1019, 1027, 1032, 1036, 1038, 1047, 1051, 1061, 1077, 1081, 1095, or 1113.
[1006] 298. The isolated AAV particle of any one of embodiments 1-297, wherein the AAV capsid variant comprises an amino acid sequence comprising at least 5, 6, 7, 8, or 9 consecutive amino acids from the amino acid sequence of PLNGAVHLY (SEQ ID NO: 3648), wherein:
   [1007] (i) the 5 consecutive amino acids comprise PLNGA (SEQ ID NO: 3679);
   [1008] (ii) the 6 consecutive amino acids comprise PLNGAV (SEQ ID NO: 3680);
   [1009] (iii) the 7 consecutive amino acids comprise PLNGAVH (SEQ ID NO: 3681);
   [1010] (iv) the 8 consecutive amino acids comprise PLNGAVHL (SEQ ID NO: 3682); or
   [1011] (v) the 9 consecutive amino acids comprise PLNGAVHLY (SEQ ID NO: 3648),
   [1012] wherein the AAV capsid variant comprises: (a) a VP1 protein comprising the amino acid sequence of SEQ ID NO: 138 or SEQ ID NO: 5, 8, or 3636; (b) a VP2 protein comprising the amino acid sequence of positions 138-736 of SEQ ID NO: 138 or positions 138-743 of SEQ ID NO: 5, 8, or 3636; (c) a VP3 protein comprising the amino acid sequence of positions 203-736 of SEQ ID NO: 138 or positions 203-743 of SEQ ID NO: 5, 8, or 3636; or (d) an amino acid sequence with at least 90% (e.g., at least about 95, 96, 97, 98, or 99%) sequence identity to any of the amino acid sequences in (a)-(c).
[1013] 299. The isolated AAV particle of any one of embodiments 1-298, wherein the AAV capsid variant comprises an amino acid sequence comprising at least 5, 6, 7, 8, or 9 consecutive amino acids from the amino acid sequence of PLNGAVHLY (SEQ ID NO: 3648), wherein:
   [1014] (i) the 5 consecutive amino acids comprise PLNGA (SEQ ID NO: 3679);
   [1015] (ii) the 6 consecutive amino acids comprise PLNGAV (SEQ ID NO: 3680);
   [1016] (iii) the 7 consecutive amino acids comprise PLNGAVH (SEQ ID NO: 3681);
   [1017] (iv) the 8 consecutive amino acids comprise PLNGAVHL (SEQ ID NO: 3682); or
   [1018] (v) the 9 consecutive amino acids comprise PLNGAVHLY (SEQ ID NO: 3648),
   [1019] wherein the AAV capsid variant comprises the amino acid sequence of any one of SEQ ID NOs: 5, 8, or 3636 or an amino acid sequence with at least 90% (e.g., at least about 95, 96, 97, 98, or 99%) sequence identity to any one of SEQ ID NOs: 5, 8, or 3636.
[1020] 300. The isolated AAV particle of any one of embodiments 1-299, wherein the AAV capsid variant comprises one or two, but no more than three different amino acids (e.g., substitutions, e.g., conservative substitutions) relative to the amino acid sequence of PLNGAVHLY (SEQ ID NO: 3648), wherein the AAV capsid variant comprises:
   [1021] (a) a VP1 protein comprising the amino acid sequence of SEQ ID NO: 5, 8, 138, or 3636;
   [1022] (b) a VP2 protein comprising the amino acid sequence of positions 138-736 of SEQ ID NO: 138 or positions 138-743 of SEQ ID NO: 5, 8, or 3636;
   [1023] (c) a VP3 protein comprising the amino acid sequence of positions 203-736 of SEQ ID NO: 138 or positions 203-743 of SEQ ID NO: 5, 8, or 3636; or
   [1024] (d) an amino acid sequence with at least 90% (e.g., at least about 95, 96, 97, 98, or 99%) sequence identity to any of the amino acid sequences in (a)-(c).
[1025] 301. The isolated AAV particle of any one of embodiments 1-300, wherein the AAV capsid variant comprises one or two, but no more than three different amino acids (e.g., substitutions, e.g., conservative substitutions) relative to the amino acid sequence of PLNGAVHLY (SEQ ID NO: 3648), wherein the AAV capsid variant comprises the amino acid sequence of any one of SEQ ID NOs: 5, 8, 138, or 3636 or an amino acid sequence with at least 90% (e.g., at least about 95, 96, 97, 98, or 99%) sequence identity to any one of SEQ ID NOs: 5, 8, 138, or 3636.
[1026] 302. The isolated AAV particle of any one of embodiments 298-302, wherein the amino acid sequence is present immediately subsequent to position 586, numbered according to any one of SEQ ID NO: 5, 8, 138, or 3636, optionally wherein the amino acid replaces positions 587 and 588 (e.g., A587 and Q588), numbered according to SEQ ID NO: 138.
[1027] 303. The isolated AAV particle of any one of embodiments 298-302, wherein the amino acid sequence corresponds to positions 587-595 of SEQ ID NO: 5, 8, or 3636.
[1028] 304. The isolated AAV particle of any one of embodiments 1-303, wherein the AAV capsid variant comprises one or two, but no more than three different amino acids (e.g., substitutions, e.g. conservative substitutions) relative to the amino acid sequence of PLNGAVHLYAQAQLSPVKN (SEQ ID NO: 566), wherein the AAV capsid variant comprises:
   [1029] (a) a VP1 protein comprising the amino acid sequence of SEQ ID NO: 5, 8, 138, or 3636;
   [1030] (b) a VP2 protein comprising the amino acid sequence of positions 138-736 of SEQ ID NO: 138 or positions 138-743 of SEQ ID NO: 5, 8, or 3636;
   [1031] (c) a VP3 protein comprising the amino acid sequence of positions 203-736 of SEQ ID NO: 138 or positions 203-743 of SEQ ID NO: 5, 8, or 3636; or
   [1032] (d) an amino acid sequence with at least 90% (e.g., at least about 95, 96, 97, 98, or 99%) sequence identity to any of the amino acid sequences in (a)-(c).
[1033] 305. The isolated AAV particle of any one of embodiments 1-304, wherein the AAV capsid variant comprises one or two, but no more than three different amino acids (e.g., substitutions, e.g., conservative substitutions) relative to the amino acid sequence of PLNGAVHLYAQAQLSPVKN (SEQ ID NO: 566), wherein the AAV capsid variant comprises the amino acid sequence of any one of SEQ ID NOs: 5, 8, 138, or 3636 or an amino acid sequence with at least 90% (e.g., at least about 95, 96, 97, 98, or 99%) sequence identity to any one of SEQ ID NOs: 5, 8, 138, or 3636.
[1034] 306. The isolated AAV particle of any one of embodiments 1-303, wherein the AAV capsid variant comprises one or two, but no more than three different amino acids (e.g., substitutions, e.g., conservative substitutions) relative to the amino acid sequence of PLNGAVHLYAQAQTGWVPN (SEQ ID NO: 314), wherein the AAV capsid variant comprises:
   [1035] (a) a VP1 protein comprising the amino acid sequence of SEQ ID NO: 5, 8, 138, or 3636;
   [1036] (b) a VP2 protein comprising the amino acid sequence of positions 138-736 of SEQ ID NO: 138 or positions 138-743 of SEQ ID NO: 5, 8, or 3636;
   [1037] (c) a VP3 protein comprising the amino acid sequence of positions 203-736 of SEQ ID NO: 138 or positions 203-743 of SEQ ID NO: 5, 8, or 3636; or
   [1038] (d) an amino acid sequence with at least 90% (e.g., at least about 95, 96, 97, 98, or 99%) sequence identity to any of the amino acid sequences in (a)-(c).
[1039] 307. The isolated AAV particle of any one of embodiments 1-303 or 306, wherein the AAV capsid variant comprises one or two, but no more than three different amino acids (e.g., substitutions, e.g., conservative substitutions) relative to the amino acid sequence of PLNGAVHLYAQAQTGWVPN (SEQ ID NO: 314), wherein the AAV capsid variant comprises the amino acid sequence of any one of SEQ ID NOs: 5, 8, 138, or 3636 or an amino acid sequence with at least 90% (e.g., at least about 95, 96, 97, 98, or 99%) sequence identity to any one of SEQ ID NOs: 5, 8, 138, or 3636.
[1040] 308. The isolated AAV particle of any one of embodiments 304-307, wherein the amino acid sequence is present immediately subsequent to position 586, numbered according to any one of SEQ ID NO: 5, 8, 138, or 3636, optionally wherein the amino acid replaces positions 587-598, numbered according to SEQ ID NO: 138.
[1041] 309. The isolated AAV particle of any one of embodiments 304-308, wherein the amino acid sequence corresponds to positions 587-605 of SEQ ID NO: 5 or 8.
[1042] 310. The isolated AAV particle of any one of the preceding embodiments, wherein the amino acid sequence is present in loop VIII.
[1043] 311. The isolated AAV particle of any one of embodiments 8-10, or 276-310, wherein the amino acid sequence is present immediately subsequent to position 586, 587, 588, 589, 590, 591, 592, 593, 594, or 595, relative to a reference sequence numbered according to the amino acid sequence of SEQ ID NO: 138.
[1044] 312. The isolated AAV particle of any one of embodiments 276-311, wherein the amino acid sequence is present immediately subsequent to position 586, relative to a reference sequence numbered according to the amino acid sequence of SEQ ID NO: 138.
[1045] 313. The isolated AAV particle of any one of embodiments 276-312, wherein the amino acid sequence replaces positions 587 and 588 (e.g., A587 and Q588), numbered according to SEQ ID NO: 138.
[1046] 314. The isolated AAV particle of any one of embodiments 276-311, wherein the amino acid sequence is present immediately subsequent to position 588, relative to a reference sequence numbered according to the amino acid sequence of SEQ ID NO: 138.
[1047] 315. The isolated AAV particle of any one of embodiments 276-311, wherein the amino acid sequence is present immediately subsequent to position 592, relative to a reference sequence numbered according to the amino acid sequence of SEQ ID NO: 138.
[1048] 316. The isolated AAV particle of any one of embodiments 276-311, wherein the amino acid sequence is present immediately subsequent to position 595, relative to a reference sequence numbered according to the amino acid sequence of SEQ ID NO: 138.
[1049] 317. The isolated AAV particle of any one of embodiments 276-316, wherein the AAV capsid variant further comprises:
   [1050] (i) one, two, three, or all of an amino acid other than A at position 589, an amino acid other than Q at position 590, an amino acid other than A at position 591, and/or an amino acid other than Q at position 592, relative to a reference sequence numbered according to the amino acid sequence of SEQ ID NO: 138;
   [1051] (ii) one, two, or all of an amino acid other than T at position 593, an amino acid other than G at position 594, and/or an amino acid other than W at position 595, relative to a reference sequence numbered according to the amino acid sequence of SEQ ID NO: 138
   [1052] (iii) one, two, or all of an amino acid other than V at position 596, an amino acid other than Q at position 597, and/or an amino acid other than N at position 598, relative to a reference sequence numbered according to the amino acid sequence of SEQ ID NO: 138.
[1053] 318. The isolated AAV particle of any one of the preceding embodiments, wherein the AAV capsid variant further comprises an amino acid other than A at position 587 and an amino acid other than Q at position 588, numbered according to the amino acid sequence of SEQ ID NO: 138.
[1054] 319. The isolated AAV particle of any one of embodiments 276-318, wherein the AAV capsid variant comprises the amino acid P at position 587 the amino acid L at position 588, and the amino acid sequence NGAVHLY (SEQ ID NO: 3689), which is present immediately subsequent to position 588, corresponding to or numbered according to SEQ ID NO: 5, 8, 138, or 3636.
[1055] 320. An isolated, e.g., recombinant, AAV particle comprising an AAV capsid variant and a nucleic acid comprising a transgene encoding an antibody that binds to human tau (e.g., SEQ ID NO: 1404), wherein the AAV capsid variant comprises the amino acid P at position 587 the amino acid L at position 588, and the amino acid sequence NGAVHLY (SEQ ID NO: 3689) present immediately subsequent to position 588, corresponding to or numbered according to SEQ ID NO: 5, 8, 138, or 3636.
[1056] 321. The isolated AAV particle of any one of embodiments 276-320, wherein the AAV capsid variant further comprises:
   [1057] (i) one, two, or all of an amino acid other than T at position 593, an amino acid other than G at position 594, and/or an amino acid other than W at position 595, numbered according to the amino acid sequence of SEQ ID NO: 138; or
   [1058] (ii) one, two, or all of an amino acid other than T at position 600, an amino acid other than G at position 601, and/or an amino acid other than W at position 602, numbered according to the amino acid sequence of SEQ ID NO: 5, 8, or 3636.
[1059] 322. The isolated AAV particle of any one of embodiments 276-321, wherein the AAV capsid variant further comprises:
   [1060] (i) an amino acid other than T at position 593, an amino acid other than G at position 594, and an amino acid other than W at position 595, numbered according to the amino acid sequence of SEQ ID NO: 138; or
   [1061] (ii) an amino acid other than T at position 600, an amino acid other than G at position 601, and an amino acid other than W at position 602, numbered according to the amino acid sequence of SEQ ID NO: 5, 8, or 3636.
[1062] 323. The isolated AAV particle of any one of embodiments 276-322, wherein the AAV capsid variant further comprises:
   [1063] (i) one, two, or all of the amino acid L at position 593, the amino acid S at position 594, and/or the amino acid P at position 595, numbered according to the amino acid sequence of SEQ ID NO: 138;
   [1064] (ii) one, two, or all of the amino acid L at position 600, the amino acid S at position 601, and/or the amino acid P at position 602, numbered according to the amino acid sequence of SEQ ID NO: 5, 8, or 3636.
[1065] 324. The isolated AAV particle of any one of embodiments 276-323, wherein the AAV capsid variant further comprises:
   [1066] (i) the amino acid L at position 593, the amino acid S at position 594, and the amino acid P at position 595, numbered according to the amino acid sequence of SEQ ID NO: 138; or
   [1067] (ii) the amino acid L at position 600, the amino acid S at position 601, and the amino acid P at position 602, numbered according to the amino acid sequence of SEQ ID NO: 5, 8, or 3636.
[1068] 325. The isolated AAV particle of any one of embodiments 276-324, wherein the AAV capsid variant further comprises:
   [1069] (i) one, two, or all of an amino acid other than V at position 596, an amino acid other than Q at position 597, and/or an amino acid other than N at position 598, numbered according to the amino acid sequence of SEQ ID NO: 138;
   [1070] (ii) one, two, or all of an amino acid other than V at position 603, an amino acid other than Q at position 604, and/or an amino acid other than N at position 605, numbered according to the amino acid sequence of SEQ ID NO: 5, 8, 3636.
[1071] 326. The isolated AAV particle of any one of embodiments 276-325, wherein the AAV capsid variant further comprises an amino acid other than Q at position 597 numbered according to the amino acid sequence of SEQ ID NO: 138 or at position 604 numbered according to SEQ ID NO: 5, 8, or 3636.
[1072] 327. The isolated AAV particle of any one of embodiments 276-326, wherein the AAV capsid variant further comprises the amino acid P at position 597 numbered according to the amino acid sequence of SEQ ID NO: 138 or at position 604 numbered according to SEQ ID NO: 5, 8, or 3636.
[1073] 328. The isolated AAV particle of any one of embodiments 276-326, wherein the AAV capsid variant further comprises the amino acid K at position 597 numbered according to the amino acid sequence of SEQ ID NO: 138 or at position 604 numbered according to SEQ ID NO: 5, 8, or 3636.
[1074] 329. The isolated AAV particle of any one of embodiments 276-326, wherein the AAV capsid variant further comprises the amino acid E or H at position 597 numbered according to the amino acid sequence of SEQ ID NO: 138 or at position 604 numbered according to SEQ ID NO: 5, 8, or 3636.
[1075] 330. The isolated AAV particle of any one of embodiments 267-326 or 328, wherein the AAV capsid variant further comprises the amino acid L at position 593, the amino acid S at position 594, the amino acid P at position 595, and the amino acid K at position 597, numbered according to the amino acid sequence of SEQ ID NO: 138.
[1076] 331. The isolated AAV particle of any one of embodiments 276-326, 328, or 330, wherein the AAV capsid variant further comprises the amino acid L at position 600, the amino acid S at position 601, the amino acid P at position 602, and the amino acid K at position 604, corresponding to or numbered according to the amino acid sequence of SEQ ID NO: 8 or 3636.
[1077] 332. The isolated AAV particle of any one of embodiments 276-326, 328, 330, or 331, wherein the AAV capsid variant comprises:
   [1078] (i) the amino acid sequence of PLNGAVHLY (SEQ ID NO: 3648), optionally where the amino acid sequence is present immediately subsequent to position 586 and replaces positions 587 and 588 (e.g., A587 and Q 588), numbered according to SEQ ID NO: 138; and
   [1079] (ii) the amino acid L at position 593, the amino acid S at position 594, the amino acid P at position 595, and the amino acid K at position 597, numbered according to the amino acid sequence of SEQ ID NO: 138.
[1080] 333. The isolated AAV particle of any one of embodiments 276-326, 328, or 330-332, wherein the AAV capsid variant comprises:
   [1081] (i) the amino acid P at position 587, the amino acid L at position 588, and the amino acid sequence NGAVHLY (SEQ ID NO: 3689), which is present immediately subsequent to position 588, numbered according to SEQ ID NO: 138; and
   [1082] (ii) the amino acid L at position 593, the amino acid S at position 594, the amino acid P at position 595, and the amino acid K at position 597, numbered according to the amino acid sequence of SEQ ID NO: 138.
[1083] 334. The isolated AAV particle of any one of embodiments 276-326, 328, or 330-333, wherein the AAV capsid variant comprises:
   [1084] (i) the amino acid P at position 587, the amino acid L at position 588, and the amino acid sequence NGAVHLY (SEQ ID NO: 3689), which is present immediately subsequent to position 588, corresponding to or numbered according to SEQ ID NO: 8 or 3636; and
   [1085] (ii) the amino acid L at position 600, the amino acid S at position 601, the amino acid P at position 602, and the amino acid K at position 604, corresponding to or numbered according to the amino acid sequence of SEQ ID NO: 8 or 3636.
[1086] 335. The isolated AAV particle of any one of embodiments 276-327, wherein the AAV capsid variant further comprises the amino acid P at position 597, numbered according to the amino acid sequence of SEQ ID NO: 138.
[1087] 336. The isolated AAV particle of any one of embodiments 276-327 or 335, wherein the AAV capsid variant further comprises the amino acid P at position 604, corresponding to or numbered according to the amino acid sequence of SEQ ID NO: 5 or 3636.
[1088] 337. The isolated AAV particle of any one of embodiments 276-327, 335, or 336, wherein the AAV capsid variant comprises:
   [1089] (i) the amino acid sequence of PLNGAVHLY (SEQ ID NO: 3648), optionally where the amino acid sequence is present immediately subsequent to position 586 and replaces positions 587 and 588 (e.g., A587 and Q 588), numbered according to SEQ ID NO: 138; and
   [1090] (ii) the amino acid P at position 597, numbered according to the amino acid sequence of SEQ ID NO: 138.
[1091] 338. The isolated AAV particle of any one of embodiments 276-327 or 335-337, wherein the AAV capsid variant comprises:
   [1092] (i) the amino acid P at position 587, the amino acid L at position 588, and the amino acid sequence NGAVHLY (SEQ ID NO: 3689), which is present immediately subsequent to position 588, numbered according to SEQ ID NO: 138; and
   [1093] (ii) the amino acid P at position 597, numbered according to the amino acid sequence of SEQ ID NO: 138.
[1094] 339. The isolated AAV particle of any one of embodiments 276-327 or 335-338, wherein the AAV capsid variant comprises:
   [1095] (i) the amino acid P at position 587, the amino acid L at position 588, and the amino acid sequence NGAVHLY (SEQ ID NO: 3689), which is present immediately subsequent to position 588, corresponding to or numbered according to SEQ ID NO: 5 or 3636; and
   [1096] (ii) the amino acid P at position 604, corresponding to or numbered according to the amino acid sequence of SEQ ID NO: 5 or 3636.
[1097] 340. An isolated, e.g., recombinant, AAV particle comprising an AAV capsid variant and a nucleic acid comprising a transgene encoding an antibody that binds to human tau (e.g., SEQ ID NO: 1404), or a fragment thereof, wherein the AAV capsid variant comprises:
   [1098] (i) the amino acid sequence of PLNGAVHLY (SEQ ID NO: 3648), optionally where the amino acid sequence is present immediately subsequent to position 586 and replaces positions 587 and 588 (e.g., A587 and Q 588), numbered according to SEQ ID NO: 138; and
   [1099] (ii) the amino acid L at position 593, the amino acid S at position 594, the amino acid P at position 595, and the amino acid K at position 597, numbered according to the amino acid sequence of SEQ ID NO: 138.
[1100] 341. An isolated, e.g., recombinant, AAV particle comprising an AAV capsid variant and a nucleic acid comprising a transgene encoding an antibody that binds to human tau (e.g., SEQ ID NO: 1404), or a fragment thereof, wherein the AAV capsid variant comprises:
   [1101] (i) the amino acid P at position 587, the amino acid L at position 588, and the amino acid sequence NGAVHLY (SEQ ID NO: 3689), which is present immediately subsequent to position 588, numbered according to SEQ ID NO: 138; and
   [1102] (ii) the amino acid L at position 593, the amino acid S at position 594, the amino acid P at position 595, and the amino acid K at position 597, numbered according to the amino acid sequence of SEQ ID NO: 138.
[1103] 342. An isolated, e.g., recombinant, AAV particle comprising an AAV capsid variant and a nucleic acid comprising a transgene encoding an antibody that binds to human tau (e.g., SEQ ID NO: 1404), or a fragment thereof, wherein the AAV capsid variant comprises:
   [1104] (i) the amino acid P at position 587, the amino acid L at position 588, and the amino acid sequence NGAVHLY (SEQ ID NO: 3689), which is present immediately subsequent to position 588, corresponding to or numbered according to SEQ ID NO: 8 or 3636; and
   [1105] (ii) the amino acid L at position 600, the amino acid S at position 601, the amino acid P at position 602, and the amino acid K at position 604, corresponding to or numbered according to the amino acid sequence of SEQ ID NO: 8 or 3636.
[1106] 343. An isolated, e.g., recombinant, AAV particle comprising an AAV capsid variant and a nucleic acid comprising a transgene encoding an antibody that binds to human tau (e.g., SEQ ID NO: 1404), or a fragment thereof, wherein the AAV capsid variant comprises:
   [1107] (i) the amino acid sequence of PLNGAVHLY (SEQ ID NO: 3648), optionally where the amino acid sequence is present immediately subsequent to position 586 and replaces positions 587 and 588 (e.g., A587 and Q 588), numbered according to SEQ ID NO: 138; and
   [1108] (ii) the amino acid P at position 597, numbered according to the amino acid sequence of SEQ ID NO: 138.
[1109] 344. An isolated, e.g., recombinant, AAV particle comprising an AAV capsid variant and a nucleic acid comprising a transgene encoding an antibody that binds to human tau (e.g., SEQ ID NO: 1404), or a fragment thereof, wherein the AAV capsid variant comprises:
   [1110] (i) the amino acid P at position 587, the amino acid L at position 588, and the amino acid sequence NGAVHLY (SEQ ID NO: 3689), which is present immediately subsequent to position 588, numbered according to SEQ ID NO: 138; and
   [1111] (ii) the amino acid P at position 597, numbered according to the amino acid sequence of SEQ ID NO: 138.
[1112] 345. An isolated, e.g., recombinant, AAV particle comprising an AAV capsid variant and a nucleic acid comprising a transgene encoding an antibody that binds to human tau (e.g., SEQ ID NO: 1404), or a fragment thereof, wherein the AAV capsid variant comprises:
   [1113] (i) the amino acid P at position 587, the amino acid L at position 588, and the amino acid sequence NGAVHLY (SEQ ID NO: 3689), which is present immediately subsequent to position 588, corresponding to or numbered according to SEQ ID NO: 5 or 3636; and
   [1114] (ii) the amino acid P at position 604, corresponding to or numbered according to the amino acid sequence of SEQ ID NO: 5 or 3636.
[1115] 346. The isolated AAV particle of any one of embodiments 20-345, wherein the AAV capsid variant further comprises:
   [1116] (i) a modification, e.g., an insertion, substitution (e.g., conservative substitution), and/or deletion, in loop I, II, IV, and/or VI; and/or
   [1117] (ii) a substitution at position K449, e.g., a K449R substitution, numbered according to SEQ ID NO: 138.
[1118] 347. The isolated AAV particle of any one of embodiments 20-346, wherein the AAV capsid variant comprises an amino acid sequence comprising at least one, two or three modifications, e.g., substitutions (e.g., conservative substitutions), but not more than 30, 20 or 10 modifications, e.g., substitutions (e.g., conservative substitutions), relative to the amino acid sequence of SEQ ID NO: 138.
[1119] 348. The isolated AAV particle of any one of embodiments 20-347, wherein the AAV capsid variant comprises an amino acid sequence comprising at least one, two or three, but no more than 30, 20 or 10 different amino acids relative to the amino acid sequence of SEQ ID NO: 138.
[1120] 349. The isolated AAV particle of any one of embodiments 20-348, wherein the AAV capsid variant comprises the amino acid sequence of SEQ ID NO: 138, or an amino acid sequence with at least 80% (e.g., at least about 85, 90, 95, 96, 97, 98, or 99%) sequence identity thereto.
[1121] 350. The isolated AAV particle of any one of embodiments 20-349, wherein the AAV capsid variant comprises the amino acid sequence of SEQ ID NO: 138.
[1122] 351. The isolated AAV particle of any one of embodiments 20-350, wherein the AAV capsid variant comprises an amino acid sequence encoded by the nucleotide sequence of SEQ ID NO: 137, or a sequence with at least 80% (e.g., at least about 85, 90, 95, 96, 97, 98, or 99%) sequence identity thereto.
[1123] 352. The isolated AAV particle of any one of embodiments 20-351, wherein the nucleotide sequence encoding the capsid variant comprises the nucleotide sequence of SEQ ID NO: 137, or a sequence with at least 80% (e.g., at least about 85, 90, 95, 96, 97, 98, or 99%) sequence identity thereto.
[1124] 353. The isolated AAV particle of any one of embodiments 20-352, wherein the AAV capsid variant comprises a VP1 protein, a VP2 protein, a VP3 protein, or a combination thereof.
[1125] 354. The isolated AAV particle of any one of embodiments 20-353, wherein the AAV capsid variant comprises the amino acid sequence corresponding to positions 138-743, e.g., a VP2, of SEQ ID NO: 5, 8, or 3636, or a sequence with at least 80% (e.g., at least about 85, 90, 95, 96, 97, 98, or 99%) sequence identity thereto.
[1126] 355. The isolated AAV particle of any one of embodiments 20-354, wherein the AAV capsid variant comprises the amino acid sequence corresponding to positions 203-743, e.g., a VP3, of SEQ ID NO: 5, 8, or 3636, or a sequence with at least 80% (e.g., at least about 85, 90, 95, 96, 97, 98, or 99%) sequence identity thereto.
[1127] 356. The isolated AAV particle of any one of embodiments 20-355, wherein the AAV capsid variant comprises the amino acid sequence corresponding to positions 138-736, e.g., a VP2, of SEQ ID NO: 138, or a sequence with at least 80% (e.g., at least about 85, 90, 95, 96, 97, 98, or 99%) sequence identity thereto.
[1128] 357. The isolated AAV particle of any one of embodiments 20-356, wherein the AAV capsid variant comprises the amino acid sequence corresponding to positions 203-736, e.g., a VP3, of SEQ ID NO: 138, or a sequence with at least 80% (e.g., at least about 85, 90, 95, 96, 97, 98, or 99%) sequence identity thereto.
[1129] 358. An isolated, e.g., recombinant, AAV particle comprising an AAV capsid variant and a nucleic acid comprising a transgene encoding an antibody that binds to human tau (e.g., SEQ ID NO: 1404), or a fragment thereof, wherein the AAV capsid variant comprises the amino acid sequence of SEQ ID NO: 5.
[1130] 359. The isolated AAV particle of embodiment 358, wherein the nucleotide sequence encoding the AAV capsid variant comprises the nucleotide sequence of SEQ ID NO: 4.
[1131] 360. An isolated, e.g., recombinant, AAV particle comprising an AAV capsid variant and a nucleic acid comprising a transgene encoding an antibody that binds to human tau (e.g., SEQ ID NO: 1404), or a fragment thereof, wherein the AAV capsid variant comprises the amino acid sequence of SEQ ID NO: 8.
[1132] 361. The isolated AAV particle of embodiment 360, wherein the nucleotide sequence encoding the AAV capsid variant comprises the nucleotide sequence of SEQ ID NO: 7.
[1133] 362. An isolated, e.g., recombinant, AAV particle comprising an AAV capsid variant and a nucleic acid comprising a transgene encoding an antibody that binds to human tau (e.g., SEQ ID NO: 1404), or a fragment thereof, wherein the AAV capsid variant comprises the amino acid sequence of SEQ ID NO: 3636.
[1134] 363. The isolated AAV particle of embodiment 362, wherein the nucleotide sequence encoding the AAV capsid variant comprises the nucleotide sequence of SEQ ID NO: 3623.
[1135] 364. The isolated AAV particle of any one of embodiments 20-363, wherein the AAV capsid variant does not comprise:
   [1136] (i) the amino acid sequence of TLAVPFK (SEQ ID NO: 1262) present immediately subsequent to position 588, numbered according to SEQ ID NO: 138;
   [1137] (ii) an amino acid sequence present immediately subsequent to position 586 to 599, e.g., 586 to 594, 587 to 595, 588 to 596, 589 to 597, 590 to 598 numbered relative to SEQ ID NO: 138, having at least 5 consecutive amino acids corresponding to positions 586 to 594 numbered relative to SEQ ID NO: 138, of any the amino acid sequences provided in Table 1 of WO2020223276, the contents of which are hereby incorporated by reference in their entirety; or
   [1138] (iii) an amino acid sequence present immediately subsequent to position 586 to 599, e.g., 586 to 594, 587 to 595, 588 to 596, 589 to 597, 590 to 598 numbered relative to SEQ ID NO: 138, having at least 5 consecutive amino acids corresponding to positions 586 to 594 numbered relative to SEQ ID NO: 138, of any SEQ ID NOs: 1, 12, 13, or 138.
[1139] 365. The isolated AAV particle of any one of embodiments 20-364, wherein the AAV capsid variant has an increased tropism for a CNS cell or tissue, e.g., a brain cell, brain tissue, spinal cord cell, or spinal cord tissue, relative to the tropism of a reference sequence comprising the amino acid sequence of SEQ ID NO: 138.
[1140] 366. The isolated AAV particle of any one of embodiments 20-365, wherein the AAV capsid variant has an increased tropism for a CNS cell or tissue, e.g., a brain cell, brain tissue, spinal cord cell, or spinal cord tissue, relative to the tropism of a reference sequence comprising the amino acid sequence of SEQ ID NO: 3636.
[1141] 367. The isolated AAV particle of any one of embodiments 20-366, wherein the AAV capsid variant is enriched at least about 1.1, 1.2, 1.3, 1.4, 1.5, 1.6, 1.7, 1.8, 1.9, 2, 2.5, 3, 3.5, 4, 4.5, 5, 5.5, or 6-fold, in the brain compared to a reference sequence of SEQ ID NO: 3636, e.g., when measured by an assay as described in Example 20.
[1142] 368. The isolated AAV particle of any one of embodiments 77, 80, 81, 276, 283, 286, 291, 292, 297, or 310-367, wherein the AAV capsid variant results in greater than 1, 2, 5, 10, 20, 30, 40, 50, or 100 reads per sample, e.g., when analyzed by an NGS sequencing assay, e.g., as described in Example 20.
[1143] 369. The isolated AAV particle of any one of embodiments 20-368, wherein the AAV capsid variant is enriched in the brain of at least two to three species, e.g., a non-human primate and rodent (e.g., mouse), e.g., as compared to a reference sequence of SEQ ID NO: 138.
[1144] 370. The isolated AAV particle of embodiment 369, wherein the at least two to three species are Macaca fascicularis, Chlorocebus sabaeus, Callithrix jacchus, and/or mouse (e.g., BALB/c mice).
[1145] 371. The isolated AAV particle of any one of embodiments 20-370, wherein the AAV capsid variant further comprises a modification, e.g., substitution (e.g., conservative substitution), insertion, or deletion, that results in one, two, three or all of: (1) reduced tropism in the liver; (2) de-targeted expression in the liver; (3) reduced activity in the liver; and/or (4) reduced binding to galactose.
[1146] 372. The isolated AAV particle of any one of the embodiments 20-371, wherein the AAV capsid variant further comprises:
   [1147] (i) a modification e.g., substitution (e.g., conservative substitution), insertion, or deletion, at position N470 (e.g., N470A), D271 (e.g., D271A), N272 (e.g., N297A), Y446 (e.g., Y446A), N498 (e.g., N498Y or N4981), W503 (e.g., W530R or W530A), L620 (e.g., L620F), or a combination thereof, relative to a reference sequence numbered according to SEQ ID NO: 138; or
   [1148] (ii) one, two, three, four, five or all of an amino acid other than N at position 470 (e.g., A), an amino acid other than D at position 271 (e.g., A), an amino acid other than N at position 272 (e.g., A), an amino acid other than Y at position 446 (e.g., A), and amino acid other than N at position 498 (e.g., Y or I), and amino acid other than W at position 503 (e.g., R or A), and amino acid other than L at position 620 (e.g., F), relative to a reference sequence numbered according to SEQ ID NO: 138.
[1149] 373. The isolated AAV particle of any one of embodiments 20-372, wherein the antibody comprises a heavy chain variable region (VH) comprising one, two, or three of a heavy chain complementary determining region 1 (HCDR1), a heavy chain complementary determining region 2 (HCDR2), and a heavy chain complementary determining region 3 (HCDR3), and/or a light chain variable region (VL) comprising one, two, or three of a light chain complementary determining region 1 (LCDR1), a light chain complementary determining region 2 (LCDR2), and a light chain complementary determining region 3 (LCDR3), wherein:
   [1150] (i) the HCDR1, HCDR2, HCDR3, LCDR1, LCDR2, and LCDR3 comprise the amino acid sequences of SEQ ID NO: 82, SEQ ID NO: 97, SEQ ID NO: 115, SEQ ID NO: 127, KIS, and SEQ ID NO: 1289, respectively;
   [1151] (ii) the HCDR1, HCDR2, HCDR3, LCDR1, LCDR2, and LCDR3 comprise the amino acid sequences of SEQ ID NO: 79, SEQ ID NO: 94, SEQ ID NO: 111, SEQ ID NO: 127, KIS, and SEQ ID NO: 1286, respectively;
   [1152] (iii) the HCDR1, HCDR2, HCDR3, LCDR1, LCDR2, and LCDR3 comprise the amino acid sequences of SEQ ID NO: 80, SEQ ID NO: 95, SEQ ID NO: 112, SEQ ID NO: 129, DVS, and SEQ ID NO: 1287, respectively;
   [1153] (iv) the HCDR1, HCDR2, HCDR3, LCDR1, LCDR2, and LCDR3 comprise the amino acid sequences of SEQ ID NO: 81, SEQ ID NO: 94, SEQ ID NO: 114, SEQ ID NO: 127, KIS, and SEQ ID NO: 1286, respectively;
   [1154] (v) the HCDR1, HCDR2, HCDR3, LCDR1, LCDR2, and LCDR3 comprise the amino acid sequences of SEQ ID NO: 82, SEQ ID NO: 101, SEQ ID NO: 119, SEQ ID NO: 132, KDS, and SEQ ID NO: 1294, respectively;
   [1155] (vi) the HCDR1, HCDR2, HCDR3, LCDR1, LCDR2, and LCDR3 comprise the amino acid sequences of SEQ ID NO: 77, SEQ ID NO: 92, SEQ ID NO: 109, SEQ ID NO: 127, KIS, and SEQ ID NO: 1284, respectively;
   [1156] (vii) the HCDR1, HCDR2, HCDR3, LCDR1, LCDR2, and LCDR3 comprise the amino acid sequences of SEQ ID NO: 78, SEQ ID NO: 93, SEQ ID NO: 110, SEQ ID NO: 128, GNS, and SEQ ID NO: 1285, respectively;
   [1157] (viii) the HCDR1, HCDR2, HCDR3, LCDR1, LCDR2, and LCDR3 comprise the amino acid sequences of SEQ ID NO: 78, SEQ ID NO: 96, SEQ ID NO: 113, SEQ ID NO: 130, DAS, and SEQ ID NO: 1288, respectively;
   [1158] (xi) the HCDR1, HCDR2, HCDR3, LCDR1, LCDR2, and LCDR3 comprise the amino acid sequences of SEQ ID NO: 83, SEQ ID NO: 98, SEQ ID NO: 116, SEQ ID NO: 131, DDS, and SEQ ID NO: 1290, respectively;
   [1159] (x) the HCDR1, HCDR2, HCDR3, LCDR1, LCDR2, and LCDR3 comprise the amino acid sequences of SEQ ID NO: 84, SEQ ID NO: 99, SEQ ID NO: 117, SEQ ID NO: 132, KDT, and SEQ ID NO: 1291, respectively;
   [1160] (xi) the HCDR1, HCDR2, HCDR3, LCDR1, LCDR2, and LCDR3 comprise the amino acid sequences of SEQ ID NO: 85, SEQ ID NO: 100, SEQ ID NO: 118, SEQ ID NO: 133, KVS, and SEQ ID NO: 1292, respectively;
   [1161] (xii) the HCDR1, HCDR2, HCDR3, LCDR1, LCDR2, and LCDR3 comprise the amino acid sequences of SEQ ID NO: 85, SEQ ID NO: 100, SEQ ID NO: 118, SEQ ID NO: 134, SEQ ID NO: 1283, and SEQ ID NO: 1293, respectively;
   [1162] (xiii) the HCDR1, HCDR2, HCDR3, LCDR1, LCDR2, and LCDR3 comprise the amino acid sequences of SEQ ID NO: 86, SEQ ID NO: 102, SEQ ID NO: 120, SEQ ID NO: 127, KIS, and SEQ ID NO: 1286, respectively;
   [1163] (xiv) the HCDR1, HCDR2, HCDR3, LCDR1, LCDR2, and LCDR3 comprise the amino acid sequences of SEQ ID NO: 87, SEQ ID NO: 103, SEQ ID NO: 121, SEQ ID NO: 132, KDS, and SEQ ID NO: 1295, respectively;
   [1164] (xv) the HCDR1, HCDR2, HCDR3, LCDR1, LCDR2, and LCDR3 comprise the amino acid sequences of SEQ ID NO: 78, SEQ ID NO: 104, SEQ ID NO: 122, SEQ ID NO: 135, DVS, and SEQ ID NO: 1296, respectively;
   [1165] (xvi) the HCDR1, HCDR2, HCDR3, LCDR1, LCDR2, and LCDR3 comprise the amino acid sequences of SEQ ID NO: 78, SEQ ID NO: 104, SEQ ID NO: 122, SEQ ID NO: 136, AAS, and SEQ ID NO: 1297, respectively;
   [1166] (xvii) the HCDR1, HCDR2, HCDR3, LCDR1, LCDR2, and LCDR3 comprise the amino acid sequences of SEQ ID NO: 88, SEQ ID NO: 105, SEQ ID NO: 123, SEQ ID NO: 1279, WAS, and SEQ ID NO: 1298, respectively;
   [1167] (xviii) the HCDR1, HCDR2, HCDR3, LCDR1, LCDR2, and LCDR3 comprise the amino acid sequences of SEQ ID NO: 89, SEQ ID NO: 106, SEQ ID NO: 124, SEQ ID NO: 1280, LGS, and SEQ ID NO: 1299, respectively;
   [1168] (xix) the HCDR1, HCDR2, HCDR3, LCDR1, LCDR2, and LCDR3 comprise the amino acid sequences of SEQ ID NO: 90, SEQ ID NO: 107, SEQ ID NO: 125, SEQ ID NO: 1281, WAS, and SEQ ID NO: 1300, respectively;
   [1169] (xx) the HCDR1, HCDR2, HCDR3, LCDR1, LCDR2, and LCDR3 comprise the amino acid sequences of SEQ ID NO: 91, SEQ ID NO: 108, SEQ ID NO: 126, SEQ ID NO: 1282, VGS, and SEQ ID NO: 1301, respectively;
   [1170] (xxi) the HCDR1, HCDR2, HCDR3, LCDR1, LCDR2, and LCDR3 comprise the amino acid sequences of any of the HCDR and LCDR sequences provided in Table 1; or
   [1171] (xxii) a variant, e.g., functional variant, of the antibodies of any one of (i)-(xxi), wherein any one, two, three, four, five or all of the HCDR1, HCDR2, HCDR3, LCDR1, LCDR2, and/or LCDR3 comprises one, two, or at most three substitutions (e.g., conservative substitutions); or wherein any one, two, three, four, five or all of the HCDR1, HCDR2, HCDR3, LCDR1, LCDR2, and/or LCDR3 comprises one, two, or at most three different amino acids relative to any of the sequences in (i)-(xxi).
[1172] 374. The isolated AAV particle of embodiment 373, wherein the VH comprises:
   [1173] (i) the amino acid sequence of any VH provided in Table 1, or an amino acid sequence having at least 70%, 75%, 80%, 85%, 90%, 92%, 95%, 96%, 97%, 98%, or 99% sequence identity thereto;
   [1174] (ii) an amino acid sequence comprising at least one, two or three modifications, but not more than 30, 20 or 10 modifications relative to the amino acid sequence of any VH provided in Table 1; or
   [1175] (iii) an amino acid sequence comprising at least one, two or three, but not more than 30, 20 or 10 different amino acids relative to any one of the amino acid sequences of any VH sequences provided in Table 1.
[1176] 375. The isolated AAV particle of embodiment 373 or 374, wherein the VL comprises:
   [1177] (i) the amino acid sequence of any VL provided in Table 1, or an amino acid sequence having at least 70%, 75%, 80%, 85%, 90%, 92%, 95%, 96%, 97%, 98%, or 99% sequence identity thereto;
   [1178] (ii) an amino acid sequence comprising at least one, two or three modifications, but not more than 30, 20 or 10 modifications relative to the amino acid sequence of any VL provided in Table 1;
   [1179] (iii) an amino acid sequence comprising at least one, two or three, but not more than 30, 20 or 10 different amino acids relative to any one of the amino acid sequences of any VL sequences provided in Table 1.
[1180] 376. The isolated AAV particle of any one of embodiments 20-375, wherein the encoded antibody that binds to human tau comprises the isolated antibody of any one of enumerated embodiments E1-E68.
[1181] 377. The isolated AAV particle of any one of embodiments 20-375, which further comprises a viral genome comprising the transgene encoding the antibody that binds to human tau, wherein the viral genome further comprises a promoter operably linked to the transgene.
[1182] 378. The isolated AAV particle of embodiment 377, wherein the viral genome comprises the AAV viral genome of any one of enumerated embodiments E73-E129.
[1183] 379. A cell comprising the isolated AAV particle of any one of embodiments 20-378.
[1184] 380. The cell of embodiment 379, which a mammalian cell, e.g., an HEK293 cell, an insect cell, e.g., an Sf9 cell, or a bacterial cell.
[1185] 381. A method of making the isolated AAV particle of any one of embodiments 20-378, the method comprising:
   [1186] (i) providing a host cell comprising a viral genome and the AAV capsid variant;
   [1187] (ii) incubating the host cell under conditions suitable to enclose the viral genome in a capsid protein thereby making the isolated AAV particle.
[1188] 382. The method of embodiment 381, further comprising, prior to step (i), introducing a first nucleic acid molecule comprising the viral genome into the host cell.
[1189] 383. The method of embodiment 381 or 382, wherein the host cell comprises a second nucleic acid encoding the AAV capsid variant.
[1190] 384. The method of embodiment 383, further comprising introducing the second nucleic acid into the cell.
[1191] 385. The method of embodiment 383 or 384, wherein the second nucleic acid molecule is introduced into the host cell prior to, concurrently with, or after the first nucleic acid molecule.
[1192] 386. The method of any one of embodiments 381-385, wherein the host cell comprises a mammalian cell, e.g., an HEK293 cell, an insect cell, e.g., an Sf9 cell, or a bacterial cell.
[1193] 387. A pharmaceutical composition comprising the isolated AAV particle of any one of embodiments 20-378, and a pharmaceutically acceptable excipient.
[1194] 388. A method of delivering to a subject an exogenous antibody that binds to human tau, the method comprising administering to the subject an effective amount of the pharmaceutical composition of embodiment 387 or the isolated AAV particle of any one of embodiments 20-378, thereby delivering the exogenous antibody that binds to human tau.
[1195] 389. The method of embodiment 388, wherein the subject has, has been diagnosed with having, or is at risk of having a disease associated with expression of tau.
[1196] 390. The method of embodiment 388 or 389, wherein the subject has, has been diagnosed with having, or is at risk of having a neurological, e.g., neurodegenerative disorder.
[1197] 391. The method of any one of embodiments 388-390, wherein the subject has, has been diagnosed with having, or is at risk of having a tauopathy.
[1198] 392. A method of treating a subject having or diagnosed with having a disease associated with expression of tau, the method comprising administering to the subject an effective amount of the pharmaceutical composition of embodiment 387 or the isolated AAV particle of any one of embodiments 20-378.
[1199] 393. A method of treating a subject having or diagnosed with having a neurological, e.g., neurodegenerative disorder, the method comprising administering to the subject an effective amount of the pharmaceutical composition of embodiment 387 or the isolated AAV particle of any one of embodiments 20-378.
[1200] 394. A method of treating a subject having or diagnosed with having a tauopathy, the method comprising administering to the subject an effective amount of the pharmaceutical composition of embodiment 387 or the isolated AAV particle of any one of embodiments 20-378.
[1201] 395. The method of any one of embodiments 389-394, wherein the disease associated with tau expression, the neurological disorder, or the tauopathy comprises Alzheimer's disease (AD), frontotemporal dementia and parkinsonism linked to chromosome 17 (FTDP-17), frontotemporal lobar degeneration (FTLD), frontotemporal dementia (FTD), chronic traumatic encephalopathy (CTE), progressive supranuclear palsy (PSP), Down's syndrome, Pick's disease, corticobasal degeneration (CBD), corticobasal syndrome, amyotrophic lateral sclerosis (ALS), prion diseases, Creutzfeldt-Jakob disease (CJD), multiple system atrophy, tangle-only dementia, or progressive subcortical gliosis.
[1202] 396. The method of any one of embodiments 388-395, wherein the subject is a human.
[1203] 397. The method of any one of embodiments 388-396, which is administered intravenously.
[1204] 398. The method of any one of embodiments 388-396, which is administered to the subject at a dose of:
   [1205] (a) about 6.7e11 VG/kg to 2e13 VG/kg (e.g., 6.7e11 VG/kg, 2e12 VG/kg, 6.7e12 VG/kg, or 2e13 VG/kg) or about 5e11 VG/kg to 3e13 VG/kg;
   [1206] (b) about 6.7e10 VG/kg to 6.7e12 VG/kg, about 1.3e1l VG/kg to 3.4e12 VG/kg, or about 2.2e1l VG/kg to 2e12 VG/kg;
   [1207] (c) about 4e11 VG/kg to 8e11 VG/kg (e.g., about 6.7e11 VG/kg);
   [1208] (d) about 2e11 VG/kg to 2e13 VG/kg, about 4e11 VG/kg to 1e13 VG/kg, about 6.7e1l VG/kg to about 6e12 VG/kg;
   [1209] (e) about 1e12 VG/kg to 5e12 VG/kg (e.g., about 2e12 VG/kg);
   [1210] (f) about 6.7e1l VG/kg to 6.7e13 VG/kg, about 1.3e12 VG/kg to 3.4e13 VG/kg, or about 2.2e12 VG/kg to 2e13 VG/kg;
   [1211] (g) about 4e12 VG/kg to 8e12 VG/kg (e.g., about 6.7e12 VG/kg);
   [1212] (h) about 2e12 VG/kg to 2e14 VG/kg, about 4e12 VG/kg to 1e14 VG/kg, about 6.7e12 VG/kg to about 6e13 VG/kg; or
   [1213] (i) about 1e13 VG/kg to 5e13 VG/kg (e.g., about 2e13 VG/kg).
[1214] 399. The pharmaceutical composition of embodiment 387 or the isolated AAV particle of any one of embodiments 20-378 for use in a method of treating a neurological disorder, a neurodegenerative disorder, a disease associated with tau expression or activity, or a tau-related disease (e.g., tauopathy).
[1215] 400. The pharmaceutical composition of embodiment 387 or the isolated AAV particle of any one of embodiments 20-378 for use in the manufacture of a medicament.
[1216] 401. The pharmaceutical composition of embodiment 387 or the isolated AAV particle of any one of embodiments 20-378 for use in the manufacture of a medicament for treating a neurological disorder, a neurodegenerative disorder, a disease associated with tau expression or activity, or a tau-related disease (e.g., tauopathy).
[1217] 402. Use of the pharmaceutical composition of embodiment 387 or the isolated AAV particle of any one of embodiments 20-378 in the manufacture of a medicament.
[1218] 403. Use of the pharmaceutical composition of embodiment 387 or the isolated AAV particle of any one of embodiments 20-378 in the manufacture of a medicament for treating a neurological disorder, a neurodegenerative disorder, a disease associated with tau expression or activity, or a tau-related disease (e.g., tauopathy).

### BRIEF DESCRIPTION OF THE DRAWINGS

[1219] The patent or application file contains at least one drawing executed in color. Copies of this patent or patent application publication with color drawing(s) will be provided by the Office upon request and payment of the necessary fee.

[1220] FIGS. 1A-1C show the results of competition ELISA assays for binding of the indicated antibodies (±competitors) to Peptide 12 (corresponding to SEQ ID NO: 1407) (FIG. 1A), a TauS404 peptide (FIG. 1B), or the AC04 peptide (FIG. 1C).

[1221] FIG. 2 shows the results of a competition ELISA assay for binding of AT8 in the presence or absence of VY003, VY007, VY006, VY001, or an isotype antibody control to PepScan Fragment 97 (corresponding to SEQ ID NO: 1413).

[1222] FIG. 3 shows the results of a one point ELISA assay for binding of the indicated antibodies to Tau peptides having the following phosphorylated residues: pT231 (left bar), pS235 (right bar), or pT231/pS235 (middle bar).

[1223] FIGS. 4A and 4B show the detection of tau pathology using hippocampal lysates from P301S mice administered AD brain-derived PHFs. FIG. 4A shows relative AT8 immunoreactivity (IR) by AT8 ELISA using hippocampal lysates from P301S mice injected with ePHF or PBS (vehicle) on the ipsilateral site (inj) or contralateral site (con). FIG. 4B shows results of immunohistochemical staining with the AT100 anti-tau antibody in the hippocampus of a P301S mouse administered PHFs (Tau seed inj) or vehicle (PBS). A significant number of CA neurons on the ipsilateral site exhibit tau pathology (AT100 positives).

[1224] FIGS. 5A and 5B show the effects of antibodies VY004, VY006, VY011, VY007, and VY018 in reducing tau pathology in the ipsilateral hippocampus of P301S mice by AT8 ELISA. Results are presented relative to the IgG control antibody. PHF1 and Ab01 were used as positive controls.

[1225] FIG. 6A is a graph showing the percentage of transduced cells (% HA positive cells) in various brain regions of NHPs following intravenous administration of a dose of 6.7e12 VG/kg of AAV particles comprising the TTD-001 capsid variant. FIG. 6B is a graph showing the percentage of transduced cells (% HA positive cells) in various brain regions of NHPs following intravenous administration of a dose of 2e13 VG/kg of AAV particles comprising the TTD-001 capsid variant.

[1226] FIG. 6C is a graph showing the percentage of neuronal transduction (% HA cells among SMI311+cells) in the thalamus, dentate nucleus, and spinal cord of the NHPs following intravenous administration of a dose of 2e13 VG/kg of AAV particles comprising the TTD-001 capsid variant.

### DETAILED DESCRIPTION

### I. Compositions

[1227] According to the present disclosure, compositions for delivering functional anti-tau antibodies by adeno-associated virus particles (AAVs) are provided. In some embodiments, an AAV particle, e.g., an AAV particle as described herein, or plurality of particles, may be provided, e.g., delivered, via any of several routes of administration, to a cell, tissue, organ, or organism, in vivo, ex vivo, or in vitro.

[1228] In some embodiments, AAV particles, nucleic acids, e.g., nucleic acid molecules encoding an antibody, and/or payloads, e.g., an antibody described herein, and methods of using and making the same are described in WO2017189963, the contents of which are herein incorporated by reference in their entirety.

[1229] In some embodiments, the nucleic acid sequences, viral genomes, AAV vectors, and polypeptides disclosed herein may be engineered to contain modular elements and/or sequence motifs assembled to enable expression of an antibody or fragment thereof, e.g., an antibody described herein. In some embodiments, the viral genome comprises a nucleotide sequence encoding an antibody (e.g., an antibody described herein). In some embodiments, the nucleic acid sequence encodes an antibody comprising one or more of the CDRs (e.g., heavy chain and/or light chain CDRs) of an antibody, a variable heavy (VH) chain region and/or variable light (VL) chain region, a heavy and/or light chain constant region, a heavy and/or light chain, or a combination thereof. In some embodiments, the nucleic acid sequence encoding the antibody may also encode a linker, e.g., such that the VH/heavy chain and the VL/light chain of the encoded antibody are connected via a linker. In some embodiments, the order of expression, structural position, or concatemer count (e.g., the VH, VL, heavy chain, light chain, and/or linker) may be different within or among viral genome sequences. In some embodiments, the identity, position, and number of linkers expressed by a viral genome described herein may vary. In some embodiments, the viral genome may further comprise an internal repeat (ITR) sequence, promoter region, an intron region, an exon region, a Kozak sequence, an enhancer, a polyadenylation sequence, or combination thereof.

[1230] In some embodiments, the present disclosure provides methods for delivering an antibody (e.g., an anti-tau antibody described herein) and/or a nucleic acid sequence encoding an antibody (e.g., an anti-tau antibody described herein) comprised within the viral genome comprised within a recombinant, AAV particle (e.g., an AAV particle described herein) to a cell, tissue, organ, or subject.

### Adeno-Associated Viruses (AAVs) and AAV Particles

[1231] In some embodiments, AAV are used as a biological tool due to a relatively simple structure, their ability to infect a wide range of cells (including quiescent and dividing cells) without integration into the host genome and without replicating, and their relatively benign immunogenic profile. In some embodiments, the genome, e.g., viral genome, of the virus may be manipulated to contain a minimum of components for the assembly of a functional recombinant virus, or viral particle, which is loaded with or engineered to target a particular tissue and express or deliver a desired payload, e.g., an antibody (e.g., an anti-tau antibody).

[1232] In some embodiments, the AAV, e.g., naturally occurring (e.g., wild-type) AAV or a recombinant AAV, comprises a viral genome which is a linear, single-stranded nucleic acid molecule, e.g., DNA (ssDNA). In some embodiments, the viral genome, e.g., of a naturally occurring (e.g., wild-type) AAV, is approximately 5,000 nucleotides (nt) in length. In some embodiments, inverted terminal repeats (ITRs) traditionally cap the viral genome at both the 5′ and the 3′ end, providing origins of replication for the viral genome. In some embodiments, an AAV viral genome comprises two ITR sequences. In some embodiments, the ITRs have a characteristic T-shaped hairpin structure defined by a self-complementary region (145 nt in wild-type AAV) at the 5′ and 3′ ends of the ssDNA which form an energetically stable double stranded region. The double stranded hairpin structures comprise multiple functions including, but not limited to, acting as an origin for DNA replication by functioning as primers for the endogenous DNA polymerase complex of the host viral replication cell.

[1233] In some embodiments, the AAV particle, e.g., an AAV particle (e.g., ssAAVs) described herein comprises a viral genome, e.g., viral genome and/or AAV vector, that is self-complementary (scAAV). In some embodiments, the ssAAV comprises nucleic acid molecules, e.g., DNA strands, that anneal together to form double stranded DNA. In some embodiments, a scAAV allows for rapid expression in a transduced cell as it bypasses second strand synthesis.

[1234] In some embodiments, the AAV viral genome further comprises nucleotide sequences for two open reading frames, one for the four non-structural Rep proteins (Rep78, Rep68, Rep52, Rep40, encoded by Rep genes) and one for the three capsid, or structural, proteins (VP1, VP2, VP3, encoded by capsid genes or Cap genes). The Rep proteins are used for replication and packaging, while the capsid proteins are assembled to create the protein shell of the AAV particle, or AAV capsid. In some embodiments, alternative splicing and alternate initiation codons and promoters result in the generation of four different Rep proteins from a single open reading frame and the generation of three capsid proteins from a single open reading frame. For example, in some embodiments, for the AAV9/hu.14 serotype (SEQ ID NO: 138 and SEQ ID NO: 137), VP1 refers to amino acids 1-736, VP2 refers to amino acids 138-736, and VP3 refers to amino acids 203-736. In some embodiments, for the amino acid sequence of SEQ ID NO: 3636, VP1 comprises amino acids 1-743, VP2 comprises amino acids 138-742, and VP3 comprises amino acids 203-742. In some embodiments, VP1 is the full-length capsid sequence, while VP2 and VP3 are shorter components of the whole. As a result, changes in the sequence in the VP3 region, are also changes to VP1 and VP2, however, the percent difference as compared to the parent sequence will be greatest for VP3 since it is the shortest sequence of the three. Though described here in relation to the amino acid sequence, the nucleotide sequence encoding these proteins can be similarly described. In some embodiments, the three capsid proteins assemble to create the AAV capsid protein. In some embodiments, the AAV capsid protein typically comprises a molar ratio of 1:1:10 of VP1:VP2:VP3. In some embodiments, the AAV serotype is defined by the AAV capsid. In some instances, the ITRs are also specifically described by the AAV serotype (e.g., AAV2/9).

[1235] In some embodiments, a viral genome of a wild-type, e.g., naturally occurring, AAV can be modified to replace the rep/cap sequences with a nucleic acid comprising a transgene encoding a payload, e.g., an antibody or fragment thereof, wherein the viral genome comprises at least one ITR region. In some embodiments, the viral genome of a recombinant AAV comprises two ITR regions, e.g., a 5′ITR or a 3′ITR. In some embodiments, the rep/cap sequences can be provided in trans during production to generate AAV particles. In some embodiments, the viral genome of an AAV is comprised in an AAV vector, which further encodes a capsid protein e.g., a structural protein, wherein the capsid protein comprises a VP1 polypeptide, a VP2 polypeptide, and/or a VP3 polypeptide; and/or a Rep protein, e.g., a non-structural protein, wherein the Rep protein comprises a Rep78 protein, a Rep68, Rep52 protein, and/or a Rep40 protein (e.g., a Rep25 protein and/or a Rep78 protein).

[1236] In some embodiments, in addition to the viral genome comprising a nucleic acid encoding a transgene encoding a payload (e.g., an antibody, e.g., an anti-tau antibody), an AAV particle, e.g., an AAV particle described herein, may comprise the viral genome, in whole or in part, of any naturally occurring and/or recombinant AAV serotype nucleotide sequence or variant. In some embodiments, AAV variants may have sequences of significant homology at the nucleic acid (viral genome or capsid) and amino acid levels (capsids), to produce constructs which are generally physical and functional equivalents, replicate by similar mechanisms, and assemble by similar mechanisms. Chiorini et al., J. Vir. 71: 6823-33(1997); Srivastava et al., J. Vir. 45:555-64 (1983); Chiorini et al., J. Vir. 73:1309-1319 (1999); Rutledge et al., J. Vir. 72:309-319 (1998); and Wu et al., J. Vir. 74: 8635-47 (2000), the contents of each of which are incorporated herein by reference in their entirety.

[1237] In some embodiments, AAV particles of the present disclosure are recombinant AAV particles which are replication defective and lacking the nucleotide sequences encoding functional Rep and Cap proteins. In some embodiments, these defective AAV particles may lack most or all parental coding sequences and carry only one or two AAV ITR sequences and the nucleic acid of interest for delivery to a cell, a tissue, an organ, or an organism.

[1238] In some embodiments, the viral genome or the AAV vector of the AAV particles described herein comprise at least one control element which provides for the replication, transcription, and translation of a coding sequence encoded therein. In some embodiments, a sufficient number of control elements are present such that the coding sequence of the transgene encoded by the viral genome is capable of being replicated, transcribed, and/or translated in a host cell. Non-limiting examples of expression control elements include sequences for transcription initiation and/or termination, promoter and/or enhancer sequences, efficient RNA processing signals such as splicing and polyadenylation signals, sequences that stabilize cytoplasmic mRNA, sequences that enhance translation efficacy (e.g., Kozak consensus sequence), sequences that enhance protein stability, and/or sequences that enhance protein processing and/or secretion.

[1239] In some embodiments, the recombinant AAV particles of the present disclosure are capable of providing, e.g., delivering, a transgene to a mammalian cell. In some embodiments, the recombinant AAV particles of the present disclosure are capable of vectorized delivery of an antibody (e.g., an anti-tau antibody) or fragment thereof.

[1240] In some embodiments, the AAV particles, vectors, viral genomes, and/or nucleic acids of the present disclosure may be produced recombinantly and may be based on adeno-associated virus (AAV) parent or reference sequences. Methods for producing and/or modifying AAV particles are disclosed in the art such as pseudotyped AAV vectors (PCT Patent Publication Nos. WO200028004; WO200123001; WO2004112727; WO2005005610; and WO2005072364, the content of each of which is incorporated herein by reference in its entirety). In some embodiments, the AAV particles described herein may be modified to enhance the efficiency of delivery, e.g., delivery of a transgene encoding a payload, e.g., an antibody. Without wishing to be bound by theory, it is believed in some embodiments, that a modified, e.g., recombinant, AAV particle can be packaged efficiently and successfully infect target cells at high frequency and with minimal toxicity. In some embodiments, the capsid protein of the AAV particles are engineered according to the methods described in US Publication Number US20130195801, the contents of which are incorporated herein by reference in their entirety.

### AAV Capsids and Variants Thereof

[1241] In some embodiments, an AAV particle, e.g., an AAV particle for the vectorized delivery of an antibody or fragment thereof described herein (e.g., an anti-tau antibody), may comprise an AAV capsid variant. In some embodiments, the AAV capsid variant comprises a VOY101 capsid polypeptide or a functional variant thereof, a VOY9P39 capsid polypeptide or a functional variant thereof, a VOY9P33 capsid polypeptide or a functional variant thereof, a AAVPHP.B (PHP.B) capsid polypeptide or a functional variant thereof, a AAVPHP.N (PHP.N) capsid polypeptide or a functional variant thereof, an AAV1 capsid polypeptide or a functional variant thereof, an AAV2 capsid polypeptide or a functional variant thereof, an AAV5 capsid polypeptide or a functional variant thereof, an AAV9 capsid polypeptide or a functional variant thereof, an AAV9 K449R capsid polypeptide or a functional variant thereof, an AAVrh10 capsid polypeptide or a functional variant thereof. In some embodiments, the AAV capsid polypeptide, e.g., AAV capsid variant, comprises an amino acid sequence of any of the AAV capsid polypeptides in Table 1A, or an amino acid sequence substantially identical (e.g., having at least 70%, 75%, 80%, 85%, 90%, 92%, 95%, 97%, 98%, or 99% sequence identity) thereto. In some embodiments, the nucleotide sequence encoding the AAV capsid polypeptide or functional variant thereof comprises any one of the nucleotide sequence in Table 1A, or a nucleotide sequence substantially identical (e.g., having at least 70%, 75%, 80%, 85%, 90%, 92%, 95%, 97%, 98%, or 99% sequence identity) thereto.

TABLE 1A
Exemplary full length capsid sequences

| | SEQ | |
|---|---|---|
| | ID | |
| Description | NO: | Sequence Information |
| VOY101 | 1139 | MAADGYLPDWLEDNLSEGIREWWALKPGAPQPKANQQHQDNARGLVLPGYKYLGPGNGL |
| | | DKGEPVNAADAAALEHDKAYDQQLKAGDNPYLKYNHADAEFQERLKEDTSFGGNLGRAV |
| | | FQAKKRLLEPLGLVEEAAKTAPGKKRPVEQSPQEPDSSAGIGKSGAQPAKKRLNFGQTG |
| | | DTESVPDPQPIGEPPAAPSGVGSLTMASGGGAPVADNNEGADGVGSSSGNWHCDSQWLG |
| | | DRVITTSTRTWALPTYNNHLYKQISNSTSGGSSNDNAYFGYSTPWGYFDFNRFHCHFSP |
| | | RDWQRLINNNWGFRPKRLNFKLFNIQVKEVTDNNGVKTIANNLTSTVQVFTDSDYQLPY |
| | | VLGSAHEGCLPPFPADVFMIPQYGYLTLNDGSQAVGRSSFYCLEYFPSQMLRTGNNFQF |
| | | SYEFENVPFHSSYAHSQSLDRLMNPLIDQYLYYLSKTINGSGQNQQTLKFSVAGPSNMA |
| | | VQGRNYIPGPSYRQQRVSTTVTQNNNSEFAWPGASSWALNGRNSLMNPGPAMASHKEGE |
| | | DRFFPLSGSLIFGKQGTGRDNVDADKVMITNEEEIKTINPVATESYGQVATNHQSDGTL |
| | | AVPFKAQAQTGWVQNQGILPGMVWQDRDVYLQGPIWAKIPHTDGNFHPSPLMGGFGMKH |
| | | PPPQILIKNTPVPADPPTAFNKDKLNSFITQYSTGQVSVEIEWELQKENSKRWNPEIQY |
| | | TSNYYKSNNVEFAVNTEGVYSEPRPIGTRYLTRNL |
| AAV9/hu.14 | 1146 | MAADGYLPDWLEDNLSEGIREWWALKPGAPQPKANQQHQDNARGLVLPGYKYLGPGNGL |
| K449R | | DKGEPVNAADAAALEHDKAYDQQLKAGDNPYLKYNHADAEFQERLKEDTSFGGNLGRAV |
| | | FQAKKRLLEPLGLVEEAAKTAPGKKRPVEQSPQEPDSSAGIGKSGAQPAKKRLNFGQTG |
| | | DTESVPDPQPIGEPPAAPSGVGSLTMASGGGAPVADNNEGADGVGSSSGNWHCDSQWLG |
| | | DRVITTSTRTWALPTYNNHLYKQISNSTSGGSSNDNAYFGYSTPWGYFDFNRFHCHFSP |
| | | RDWQRLINNNWGFRPKRLNFKLFNIQVKEVTDNNGVKTIANNLTSTVQVFTDSDYQLPY |
| | | VLGSAHEGCLPPFPADVFMIPQYGYLTLNDGSQAVGRSSFYCLEYFPSQMLRTGNNFQF |
| | | SYEFENVPFHSSYAHSQSLDRLMNPLIDQYLYYLSRTINGSGQNQQTLKFSVAGPSNMA |
| | | VQGRNYIPGPSYRQQRVSTTVTQNNNSEFAWPGASSWALNGRNSLMNPGPAMASHKEGE |
| | | DRFFPLSGSLIFGKQGTGRDNVDADKVMITNEEEIKTTNPVATESYGQVATNHQSAQAQ |
| | | AQTGWVQNQGILPGMVWQDRDVYLQGPIWAKIPHTDGNFHPSPLMGGFGMKHPPPQILI |
| | | KNTPVPADPPTAFNKDKLNSFITQYSTGQVSVEIEWELQKENSKRWNPEIQYTSNYYKS |
| | | NNVEFAVNTEGVYSEPRPIGTRYLTRNL |
| AAV9/hu.14 | 138 | MAADGYLPDWLEDNLSEGIREWWALKPGAPQPKANQQHQDNARGLVLPGYKYLGPGNGL |
| WT | | DKGEPVNAADAAALEHDKAYDQQLKAGDNPYLKYNHADAEFQERLKEDTSFGGNLGRAV |
| (amino acid) | | FQAKKRLLEPLGLVEEAAKTAPGKKRPVEQSPQEPDSSAGIGKSGAQPAKKRLNFGQTG |
| | | DTESVPDPQPIGEPPAAPSGVGSLTMASGGGAPVADNNEGADGVGSSSGNWHCDSQWLG |
| | | DRVITTSTRTWALPTYNNHLYKQISNSTSGGSSNDNAYFGYSTPWGYFDFNRFHCHFSP |
| | | RDWQRLINNNWGFRPKRLNFKLFNIQVKEVTDNNGVKTIANNLTSTVQVFTDSDYQLPY |
| | | VLGSAHEGCLPPFPADVFMIPQYGYLTLNDGSQAVGRSSFYCLEYFPSQMLRTGNNFQF |
| | | SYEFENVPFHSSYAHSQSLDRLMNPLIDQYLYYLSKTINGSGQNQQTLKFSVAGPSNMA |
| | | VQGRNYIPGPSYRQQRVSTTVTQNNNSEFAWPGASSWALNGRNSLMNPGPAMASHKEGE |
| | | DRFFPLSGSLIFGKQGTGRDNVDADKVMITNEEEIKTTNPVATESYGQVATNHQSAQAQ |
| | | AQTGWVQNQGILPGMVWQDRDVYLQGPIWAKIPHTDGNFHPSPLMGGFGMKHPPPQILI |
| | | KNTPVPADPPTAFNKDKLNSFITQYSTGQVSVEIEWELQKENSKRWNPEIQYTSNYYKS |
| | | NNVEFAVNTEGVYSEPRPIGTRYLTRNL |
| AAV9/hu.14 | 137 | ATGGCTGCCGATGGTTATCTTCCAGATTGGCTCGAGGACAACCTTAGTGAAGGAATTCG |
| WT | | CGAGTGGTGGGCTTTGAAACCTGGAGCCCCTCAACCCAAGGCAAATCAACAACATCAAG |
| (DNA) | | ACAACGCTCGAGGTCTTGTGCTTCCGGGTTACAAATACCTTGGACCCGGCAACGGACTC |
| | | GACAAGGGGGAGCCGGTCAACGCAGCAGACGCGGCGGCCCTCGAGCACGACAAGGCCTA |
| | | CGACCAGCAGCTCAAGGCCGGAGACAACCCGTACCTCAAGTACAACCACGCCGACGCCG |
| | | AGTTCCAGGAGCGGCTCAAAGAAGATACGTCTTTTGGGGGCAACCTCGGGCGAGCAGTC |
| | | TTCCAGGCCAAAAAGAGGCTTCTTGAACCTCTTGGTCTGGTTGAGGAAGCGGCTAAGAC |
| | | GGCTCCTGGAAAGAAGAGGCCTGTAGAGCAGTCTCCTCAGGAACCGGACTCCTCCGCGG |
| | | GTATTGGCAAATCGGGTGCACAGCCCGCTAAAAAGAGACTCAATTTCGGTCAGACTGGC |
| | | GACACAGAGTCAGTCCCAGACCCTCAACCAATCGGAGAACCTCCCGCAGCCCCCTCAGG |
| | | TGTGGGATCTCTTACAATGGCTTCAGGTGGTGGCGCACCAGTGGCAGACAATAACGAAG |
| | | GTGCCGATGGAGTGGGTAGTTCCTCGGGAAATTGGCATTGCGATTCCCAATGGCTGGGG |
| | | GACAGAGTCATCACCACCAGCACCCGAACCTGGGCCCTGCCCACCTACAACAATCACCT |
| | | CTACAAGCAAATCTCCAACAGCACATCTGGAGGATCTTCAAATGACAACGCCTACTTCG |
| | | GCTACAGCACCCCCTGGGGGTATTTTGACTTCAACAGATTCCACTGCCACTTCTCACCA |
| | | CGTGACTGGCAGCGACTCATCAACAACAACTGGGGATTCCGGCCTAAGCGACTCAACTT |
| | | CAAGCTCTTCAACATTCAGGTCAAAGAGGTTACGGACAACAATGGAGTCAAGACCATCG |
| | | CCAATAACCTTACCAGCACGGTCCAGGTCTTCACGGACTCAGACTATCAGCTCCCGTAC |
| | | GTGCTCGGGTCGGCTCACGAGGGCTGCCTCCCGCCGTTCCCAGCGGACGTTTTCATGAT |
| | | TCCTCAGTACGGGTATCTGACGCTTAATGATGGAAGCCAGGCCGTGGGTCGTTCGTCCT |
| | | TTTACTGCCTGGAATATTTCCCGTCGCAAATGCTAAGAACGGGTAACAACTTCCAGTTC |
| | | AGCTACGAGTTTGAGAACGTACCTTTCCATAGCAGCTACGCTCACAGCCAAAGCCTGGA |
| | | CCGACTAATGAATCCACTCATCGACCAATACTTGTACTATCTCTCAAAGACTATTAACG |
| | | GTTCTGGACAGAATCAACAAACGCTAAAATTCAGTGTGGCCGGACCCAGCAACATGGCT |
| | | GTCCAGGGAAGAAACTACATACCTGGACCCAGCTACCGACAACAACGTGTCTCAACCAC |
| | | TGTGACTCAAAACAACAACAGCGAATTTGCTTGGCCTGGAGCTTCTTCTTGGGCTCTCA |
| | | ATGGACGTAATAGCTTGATGAATCCTGGACCTGCTATGGCCAGCCACAAAGAAGGAGAG |
| | | GACCGTTTCTTTCCTTTGTCTGGATCTTTAATTTTTGGCAAACAAGGAACTGGAAGAGA |
| | | CAACGTGGATGCGGACAAAGTCATGATAACCAACGAAGAAGAAATTAAAACTACTAACC |
| | | CGGTAGCAACGGAGTCCTATGGACAAGTGGCCACAAACCACCAGAGTGCCCAAGCACAG |
| | | GCGCAGACCGGCTGGGTTCAAAACCAAGGAATACTTCCGGGTATGGTTTGGCAGGACAG |
| | | AGATGTGTACCTGCAAGGACCCATTTGGGCCAAAATTCCTCACACGGACGGCAACTTTC |
| | | ACCCTTCTCCGCTGATGGGAGGGTTTGGAATGAAGCACCCGCCTCCTCAGATCCTCATC |
| | | AAAAACACACCTGTACCTGCGGATCCTCCAACGGCCTTCAACAAGGACAAGCTGAACTC |
| | | TTTCATCACCCAGTATTCTACTGGCCAAGTCAGCGTGGAGATCGAGTGGGAGCTGCAGA |
| | | AGGAAAACAGCAAGCGCTGGAACCCGGAGATCCAGTACACTTCCAACTATTACAAGTCT |
| | | AATAATGTTGAATTTGCTGTTAATACTGAAGGTGTATATAGTGAACCCCGCCCCATTGG |
| | | CACCAGATACCTGACTCGTAATCTGTAA |
| VOY9P39 | 1147 | MAADGYLPDWLEDNLSEGIREWWALKPGAPQPKANQQHQDNARGLVLPGYKYLGPGNGL |
| (amino acid) | | DKGEPVNAADAAALEHDKAYDQQLKAGDNPYLKYNHADAEFQERLKEDTSFGGNLGRAV |
| | | FQAKKRLLEPLGLVEEAAKTAPGKKRPVEQSPQEPDSSAGIGKSGAQPAKKRLNFGQTG |
| | | DTESVPDPQPIGEPPAAPSGVGSLTMASGGGAPVADNNEGADGVGSSSGNWHCDSQWLG |
| | | DRVITTSTRTWALPTYNNHLYKQISNSTSGGSSNDNAYFGYSTPWGYFDFNRFHCHFSP |
| | | RDWQRLINNNWGFRPKRLNFKLFNIQVKEVTDNNGVKTIANNLTSTVQVFTDSDYQLPY |
| | | VLGSAHEGCLPPFPADVFMIPQYGYLTLNDGSQAVGRSSFYCLEYFPSQMLRTGNNFQF |
| | | SYEFENVPFHSSYAHSQSLDRLMNPLIDQYLYYLSKTINGSGQNQQTLKFSVAGPSNMA |
| | | VQGRNYIPGPSYRQQRVSTTVTQNNNSEFAWPGASSWALNGRNSLMNPGPAMASHKEGE |
| | | DRFFPLSGSLIFGKQGTGRDNVDADKVMITNEEEIKTTNPVATESYGQVATNHQSDGTG |
| | | STTGWAQAQTGWVQNQGILPGMVWQDRDVYLQGPIWAKIPHTDGNFHPSPLMGGFGMKH |
| | | PPPQILIKNTPVPADPPTAFNKDKLNSFITQYSTGQVSVEIEWELQKENSKRWNPEIQY |
| | | TSNYYKSNNVEFAVNTEGVYSEPRPIGTRYLTRNL |
| VOY9P39 | 1148 | ATGGCTGCCGATGGTTATCTTCCAGattggcTCGAGGACAACCTTAGTGAAGGAATTCG |
| (DNA) | | CGAGTGGTGGGCTTTGAAACCTGGAGCCCCTCAACCCAAGGCAAATCAACAACATCAAG |
| | | ACAACGCTCGAGGTCTTGTGCTTCCGGGTTACAAATACCTTGGACCCGGCAACGGACTC |
| | | GACAAGGGGGAGCCGGTCAACGCAGCAGACGCGGCGGCCCTCGAGCACGACAAGGCCTA |
| | | CGACCAGCAGCTCAAGGCCGGAGACAACCCGTACCTCAAGTACAACCACGCCGACGCCG |
| | | AGTTCCAGGAGCGGCTCAAAGAAGATACGTCTTTTGGGGGCAACCTCGGGCGAGCAGTC |
| | | TTCCAGGCCAAAAAGAGGCTTCTTGAACCTCTTGGTCTGGTTGAGGAAGCGGCTAAGAC |
| | | GGCTCCTGGAAAGAAGAGGCCTGTAGAGCAGTCTCCTCAGGAACCGGACTCCTCCGCGG |
| | | GTATTGGCAAATCGGGTGCACAGCCCGCTAAAAAGAGACTCAATTTCGGTCAGACTGGC |
| | | GACACAGAGTCAGTCCCAGACCCTCAACCAATCGGAGAACCTCCCGCAGCCCCCTCAGG |
| | | TGTGGGATCTCTTACAATGGCTTCAGGTGGTGGCGCACCAGTGGCAGACAATAACGAAG |
| | | GTGCCGATGGAGTGGGTAGTTCCTCGGGAAATTGGCATTGCGATTCCCAATGGCTGGGG |
| | | GACAGAGTCATCACCACCAGCACCCGAACCTGGGCCCTGCCCACCTACAACAATCACCT |
| | | CTACAAGCAAATCTCCAACAGCACATCTGGAGGATCTTCAAATGACAACGCCTACTTCG |
| | | GCTACAGCACCCCCTGGGGGTATTTTGACTTCAACAGATTCCACTGCCACTTCTCACCA |
| | | CGTGACTGGCAGCGACTCATCAACAACAACTGGGGATTCCGGCCTAAGCGACTCAACTT |
| | | CAAGCTCTTCAACATTCAGGTCAAAGAGGTTACGGACAACAATGGAGTCAAGACCATCG |
| | | CCAATAACCTTACCAGCACGGTCCAGGTCTTCACGGACTCAGACTATCAGCTCCCGTAC |
| | | GTGCTCGGGTCGGCTCACGAGGGCTGCCTCCCGCCGTTCCCAGCGGACGTTTTCATGAT |
| | | TCCTCAGTACGGGTATCTGACGCTTAATGATGGAAGCCAGGCCGTGGGTCGTTCGTCCT |
| | | TTTACTGCCTGGAATATTTCCCGTCGCAAATGCTAAGAACGGGTAACAACTTCCAGTTC |
| | | AGCTACGAGTTTGAGAACGTACCTTTCCATAGCAGCTACGCTCACAGCCAAAGCCTGGA |
| | | CCGACTAATGAATCCACTCATCGACCAATACTTGTACTATCTCTCAAAGACTATTAACG |
| | | GTTCTGGACAGAATCAACAAACGCTAAAATTCAGTGTGGCCGGACCCAGCAACATGGCT |
| | | GTCCAGGGAAGAAACTACATACCTGGACCCAGCTACCGACAACAACGTGTCTCAACCAC |
| | | TGTGACTCAAAACAACAACAGCGAATTTGCTTGGCCTGGAGCTTCTTCTTGGGCTCTCA |
| | | ATGGACGTAATAGCTTGATGAATCCTGGACCTGCTATGGCCAGCCACAAAGAAGGAGAG |
| | | GACCGTTTCTTTCCTTTGTCTGGATCTTTAATTTTTGGCAAACAAGGAACTGGAAGAGA |
| | | CAACGTGGATGCGGACAAAGTCATGATAACCAACGAAGAAGAAATTAAAACTACTAACC |
| | | CGGTAGCAACGGAGTCCTATGGACAAGTGGCCACAAACCACCAGAGTGACGGAACAGGA |
| | | AGCACAACAGGATGGGCACAGGCGCAGACCGGCTGGGTTCAAAACCAAGGAATACTTCC |
| | | GGGTATGGTTTGGCAGGACAGAGATGTGTACCTGCAAGGACCCATTTGGGCCAAAATTC |
| | | CTCACACGGACGGCAACTTTCACCCTTCTCCGCTGATGGGAGGGTTTGGAATGAAGCAC |
| | | CCGCCTCCTCAGATCCTCATCAAAAACACACCTGTACCTGCCGATCCTCCAACGGCCTT |
| | | CAACAAGGACAAGCTGAACTCTTTCATCACCCAGTATTCTACTGGCCAAGTCAGCGTGG |
| | | AGATCGAGTGGGAGCTGCAGAAGGAAAACAGCAAGCGgTGGAACCCGGAGATCCAGTAC |
| | | ACTTCCAACTATTACAAGTCTAATAATGTTGAATTTGCTGTTAATACTGAAGGTGTATA |
| | | TAGTGAACCCCGCCCCATTGGCACCAGATACCTGACTCGTAATCTGTAA |
| VOY9P33 | 1150 | MAADGYLPDWLEDNLSEGIREWWALKPGAPQPKANQQHQDNARGLVLPGYKYLGPGNGL |
| (amino acid) | | DKGEPVNAADAAALEHDKAYDQQLKAGDNPYLKYNHADAEFQERLKEDTSFGGNLGRAV |
| | | FQAKKRLLEPLGLVEEAAKTAPGKKRPVEQSPQEPDSSAGIGKSGAQPAKKRLNFGQTG |
| | | DTESVPDPQPIGEPPAAPSGVGSLTMASGGGAPVADNNEGADGVGSSSGNWHCDSQWLG |
| | | DRVITTSTRTWALPTYNNHLYKQISNSTSGGSSNDNAYFGYSTPWGYFDFNRFHCHFSP |
| | | RDWQRLINNNWGFRPKRLNFKLFNIQVKEVTDNNGVKTIANNLTSTVQVFTDSDYQLPY |
| | | VLGSAHEGCLPPFPADVFMIPQYGYLTLNDGSQAVGRSSFYCLEYFPSQMLRTGNNFQF |
| | | SYEFENVPFHSSYAHSQSLDRLMNPLIDQYLYYLSKTINGSGQNQQTLKFSVAGPSNMA |
| | | VQGRNYIPGPSYRQQRVSTTVTQNNNSEFAWPGASSWALNGRNSLMNPGPAMASHKEGE |
| | | DRFFPLSGSLIFGKQGTGRDNVDADKVMITNEEEIKTTNPVATESYGQVATNHQSDGTG |
| | | QVTGWAQAQTGWVQNQGILPGMVWQDRDVYLQGPIWAKIPHTDGNFHPSPLMGGFGMKH |
| | | PPPQILIKNTPVPADPPTAFNKDKLNSFITQYSTGQVSVEIEWELQKENSKRWNPEIQY |
| | | TSNYYKSNNVEFAVNTEGVYSEPRPIGTRYLTRNL |
| VOY9P33 | 1152 | ATGGCTGCCGATGGTTATCTTCCAGattggcTCGAGGACAACCTTAGTGAAGGAATTCG |
| (DNA) | | CGAGTGGTGGGCTTTGAAACCTGGAGCCCCTCAACCCAAGGCAAATCAACAACATCAAG |
| | | ACAACGCTCGAGGTCTTGTGCTTCCGGGTTACAAATACCTTGGACCCGGCAACGGACTC |
| | | GACAAGGGGGAGCCGGTCAACGCAGCAGACGCGGCGGCCCTCGAGCACGACAAGGCCTA |
| | | CGACCAGCAGCTCAAGGCCGGAGACAACCCGTACCTCAAGTACAACCACGCCGACGCCG |
| | | AGTTCCAGGAGCGGCTCAAAGAAGATACGTCTTTTGGGGGCAACCTCGGGCGAGCAGTC |
| | | TTCCAGGCCAAAAAGAGGCTTCTTGAACCTCTTGGTCTGGTTGAGGAAGCGGCTAAGAC |
| | | GGCTCCTGGAAAGAAGAGGCCTGTAGAGCAGTCTCCTCAGGAACCGGACTCCTCCGCGG |
| | | GTATTGGCAAATCGGGTGCACAGCCCGCTAAAAAGAGACTCAATTTCGGTCAGACTGGC |
| | | GACACAGAGTCAGTCCCAGACCCTCAACCAATCGGAGAACCTCCCGCAGCCCCCTCAGG |
| | | TGTGGGATCTCTTACAATGGCTTCAGGTGGTGGCGCACCAGTGGCAGACAATAACGAAG |
| | | GTGCCGATGGAGTGGGTAGTTCCTCGGGAAATTGGCATTGCGATTCCCAATGGCTGGGG |
| | | GACAGAGTCATCACCACCAGCACCCGAACCTGGGCCCTGCCCACCTACAACAATCACCT |
| | | CTACAAGCAAATCTCCAACAGCACATCTGGAGGATCTTCAAATGACAACGCCTACTTCG |
| | | GCTACAGCACCCCCTGGGGGTATTTTGACTTCAACAGATTCCACTGCCACTTCTCACCA |
| | | CGTGACTGGCAGCGACTCATCAACAACAACTGGGGATTCCGGCCTAAGCGACTCAACTT |
| | | CAAGCTCTTCAACATTCAGGTCAAAGAGGTTACGGACAACAATGGAGTCAAGACCATCG |
| | | CCAATAACCTTACCAGCACGGTCCAGGTCTTCACGGACTCAGACTATCAGCTCCCGTAC |
| | | GTGCTCGGGTCGGCTCACGAGGGCTGCCTCCCGCCGTTCCCAGCGGACGTTTTCATGAT |
| | | TCCTCAGTACGGGTATCTGACGCTTAATGATGGAAGCCAGGCCGTGGGTCGTTCGTCCT |
| | | TTTACTGCCTGGAATATTTCCCGTCGCAAATGCTAAGAACGGGTAACAACTTCCAGTTC |
| | | AGCTACGAGTTTGAGAACGTACCTTTCCATAGCAGCTACGCTCACAGCCAAAGCCTGGA |
| | | CCGACTAATGAATCCACTCATCGACCAATACTTGTACTATCTCTCAAAGACTATTAACG |
| | | GTTCTGGACAGAATCAACAAACGCTAAAATTCAGTGTGGCCGGACCCAGCAACATGGCT |
| | | GTCCAGGGAAGAAACTACATACCTGGACCCAGCTACCGACAACAACGTGTCTCAACCAC |
| | | TGTGACTCAAAACAACAACAGCGAATTTGCTTGGCCTGGAGCTTCTTCTTGGGCTCTCA |
| | | ATGGACGTAATAGCTTGATGAATCCTGGACCTGCTATGGCCAGCCACAAAGAAGGAGAG |
| | | GACCGTTTCTTTCCTTTGTCTGGATCTTTAATTTTTGGCAAACAAGGAACTGGAAGAGA |
| | | CAACGTGGATGCGGACAAAGTCATGATAACCAACGAAGAAGAAATTAAAACTACTAACC |
| | | CGGTAGCAACGGAGTCCTATGGACAAGTGGCCACAAACCACCAGAGTGACGGAACAGGA |
| | | CAAGTCACAGGATGGGCACAGGCGCAGACCGGCTGGGTTCAAAACCAAGGAATACTTCC |
| | | GGGTATGGTTTGGCAGGACAGAGATGTGTACCTGCAAGGACCCATTTGGGCCAAAATTC |
| | | CTCACACGGACGGCAACTTTCACCCTTCTCCGCTGATGGGAGGGTTTGGAATGAAGCAC |
| | | CCGCCTCCTCAGATCCTCATCAAAAACACACCTGTACCTGCCGATCCTCCAACGGCCTT |
| | | CAACAAGGACAAGCTGAACTCTTTCATCACCCAGTATTCTACTGGCCAAGTCAGCGTGG |
| | | AGATCGAGTGGGAGCTGCAGAAGGAAAACAGCAAGCGgTGGAACCCGGAGATCCAGTAC |
| | | ACTTCCAACTATTACAAGTCTAATAATGTTGAATTTGCTGTTAATACTGAAGGTGTATA |
| | | TAGTGAACCCCGCCCCATTGGCACCAGATACCTGACTCGTAATCTGTAA |

[1242] In some embodiments, the AAV capsid variant comprises the amino acid sequence of SEQ ID NO: 138 or an amino acid sequence substantially identical (e.g., having at least 70%, 75%, 80%, 85%, 90%, 92%, 95%, 97%, 98%, or 99% sequence identity) thereto. In some embodiments the AAV capsid variant comprises an amino acid sequence comprising at least one, two, or three modifications but no more than 30, 20, or 10 modifications, e.g., substitutions, relative to the amino acid sequence of SEQ ID NO: 138. In some embodiments, the AAV capsid variant comprises an amino acid sequence encoded by the nucleotide sequence of SEQ ID NO: 137 or a nucleotide sequence substantially identical (e.g., having at least 70%, 75%, 80%, 85%, 90%, 92%, 95%, 97%, 98%, or 99% sequence identity) thereto. In some embodiments, the nucleotide sequence encoding the AAV capsid variant comprises the nucleotide sequence of SEQ ID NO: 137 or a nucleotide sequence substantially identical (e.g., having at least 70%, 75%, 80%, 85%, 90%, 92%, 95%, 97%, 98%, or 99% sequence identity) thereto. In some embodiments, the AAV capsid variant comprises substitution at position K449, e.g., a K449R substitution, numbered according to SEQ ID NO: 138.

[1243] In some embodiments, the AAV capsid variant comprises a peptide comprising the amino acid sequence of TLAVPFK (SEQ ID NO: 1262). In some embodiments, the peptide is present immediately subsequent to position 588, relative to a reference sequence numbered according to SEQ ID NO: 138. In some embodiments, the capsid polypeptide comprises the amino acid substitutions of A587D and Q588G, numbered according to SEQ ID NO: 138.

[1244] In some embodiments, the AAV capsid variant comprises the amino acid substitution of K449R, numbered according to SEQ ID NO: 138; and a peptide comprising the amino acid sequence of TLAVPFK (SEQ ID NO: 1262), wherein the peptide is present immediately subsequent to position 588, relative to a reference sequence numbered according to SEQ ID NO: 138.

[1245] In some embodiments, the AAV capsid variant comprises the amino acid substitution of K449R, numbered according to SEQ ID NO: 138; an peptide comprising the amino acid sequence of TLAVPFK (SEQ ID NO: 1262), wherein the insert is present immediately subsequent to position 588, relative to a reference sequence numbered according to SEQ ID NO: 138; and the amino acid substitutions of A587D and Q588G, numbered according to SEQ ID NO: 138.

[1246] In some embodiments, the AAV capsid variant comprises a peptide comprising the amino acid sequence of TLAVPFK (SEQ ID NO: 1262), wherein the insert is present immediately subsequent to position 588, relative to a reference sequence numbered according to SEQ ID NO: 138; and the amino acid substitutions of A587D and Q588G, numbered according to SEQ ID NO: 138.

[1247] In some embodiments, the AAV capsid variant comprises the amino acid sequence of SEQ ID NO: 1146 or an amino acid sequence substantially identical (e.g., having at least 70%, 75%, 80%, 85%, 90%, 92%, 95%, 97%, 98%, or 99% sequence identity) thereto. In some embodiments the AAV capsid variant comprises an amino acid sequence comprising at least one, two, or three modifications but no more than 30, 20, or 10 modifications, e.g., substitutions, relative to the amino acid sequence of SEQ ID NO: 11, optionally wherein position 449 is not R.

[1248] In some embodiments, the capsid polypeptide, comprises the amino acid sequence of SEQ ID NO: 1139 or an amino acid sequence substantially identical (e.g., having at least 70%, 75%, 80%, 85%, 90%, 92%, 95%, 97%, 98%, or 99% sequence identity) thereto. In some embodiments the AAV capsid variant comprises an amino acid sequence comprising at least one, two, or three modifications but no more than 30, 20, or 10 modifications, e.g., substitutions, relative to the amino acid sequence of SEQ ID NO: 1139.

[1249] In some embodiments, the AAV capsid variant comprises the amino acid sequence of SEQ ID NO: 1147 or an amino acid sequence substantially identical (e.g., having at least 70%, 75%, 80%, 85%, 90%, 92%, 95%, 97%, 98%, or 99% sequence identity) thereto. In some embodiments the AAV capsid variant comprises an amino acid sequence comprising at least one, two, or three modifications but no more than 30, 20, or 10 modifications, e.g., substitutions, relative to the amino acid sequence of SEQ ID NO: 1147. In some embodiments, the AAV capsid variant comprises an amino acid sequence encoded by the nucleotide sequence of SEQ ID NO: 1148 or a nucleotide sequence substantially identical (e.g., having at least 70%, 75%, 80%, 85%, 90%, 92%, 95%, 97%, 98%, or 99% sequence identity) thereto.

[1250] In some embodiments, the AAV capsid variant comprises the amino acid sequence of SEQ ID NO: 1150 or an amino acid sequence substantially identical (e.g., having at least 70%, 75%, 80%, 85%, 90%, 92%, 95%, 97%, 98%, or 99% sequence identity) thereto. In some embodiments the AAV capsid variant comprises an amino acid sequence comprising at least one, two, or three modifications but no more than 30, 20, or 10 modifications, e.g., substitutions, relative to the amino acid sequence of SEQ ID NO: 1150. In some embodiments, the AAV capsid variant comprises an amino acid sequence encoded by the nucleotide sequence of SEQ ID NO: 1152 or a nucleotide sequence substantially identical (e.g., having at least 70%, 75%, 80%, 85%, 90%, 92%, 95%, 97%, 98%, or 99% sequence identity) thereto.

[1251] In some embodiments, an AAV particle described herein comprises an AAV capsid variant. In some embodiments, the AAV capsid variant comprises a peptide sequence as described in Table 2A, 41, or 42. In some embodiments, the AAV capsid variant comprises a peptide sequence as described in WO2021/230987, the contents of which are hereby incorporated by reference in its entirety.

TABLE 2A
Exemplary Peptide Sequences

| | SEQ | Amino | SEQ | |
|---|---|---|---|---|
| Pep- | ID | Acid | ID | |
| tide | NO: | Sequence | NO: | Nucleotide Sequence |
| 1 | 3648 | PLNGAVHLY | 3660 | CCGCTTAATGGTGCCGTCCATCT |
| | | | | TTAT |
| 2 | 3649 | RDSPKGW | 3661 | CGTGATTCTCCGAAGGGTTGGCA |
| 3 | 3650 | YSTDVRM | 3662 | TATTCTACGGATGTGAGGATGCA |
| 4 | 3651 | IVMNSLK | 3663 | ATTGTTATGAATTCGTTGAAGGC |
| 5 | 3652 | RESPRGL | 3664 | CGGGAGAGTCCTCGTGGGCTGCA |
| 6 | 3653 | SFNDTRA | 3665 | AGTTTTAATGATACTAGGGCTCA |
| 7 | 3654 | GGTLAVVSL | 3666 | GGTGGTACGTTGGCCGTCGTGTC |
| | | | | GCTT |
| 8 | 3655 | YGLPKGP | 3667 | TATGGGTTGCCGAAGGGTCCT |
| 9 | 3656 | STGTLRL | 3668 | TCGACTGGGACGCTTCGGCTT |
| 10 | 3657 | YSTDERM | 3669 | TATTCGACGGATGAGAGGATG |
| 11 | 3658 | YSTDERK | 3670 | TATTCGACGGATGAGAGGAAG |
| 12 | 3659 | YVSSVKM | 3671 | TATGTTTCGTCTGTTAAGATG |
| 13 | 314 | PLNGAVHLYA | 6 | CCGCTTAATGGTGCCGTCCATCT |
| | | QAQTGWVPN | | TTATGCTCAGGCGCAGACCGGCT |
| | | | | GGGTTCCGAAC |
| 14 | 566 | PLNGAVHLYA | 9 | CCGCTGAATGGTGCGGTGCATCT |
| | | QAQLSPVKN | | GTATGCGCAGGCGCAGCTGTCTC |
| | | | | CGGTGAAGAAT |

[1252] In some embodiments, the AAV capsid variant comprises at least 3, 4, 5, 6, 7, 8, or 9 consecutive amino acids from the amino acid sequence of any of SEQ ID NO: 3648-3659. In some embodiments, the amino acid sequence is present in loop VIII. In some embodiments, the amino acid sequence is present immediately subsequent to position 586, 588, or 589, relative to a reference sequence numbered according to the amino acid sequence of SEQ ID NO: 138.

[1253] In some embodiments, the AAV capsid variant comprises an amino acid sequence comprising at least one, two, or three but no more than four modifications, e.g., substitutions, relative to the amino acid sequence of any of SEQ ID NO: 3648-3659. In some embodiments, the amino acid sequence is present in loop VIII. In some embodiments, the amino acid sequence is present immediately subsequent to position 586, 588, or 589, relative to a reference sequence numbered according to the amino acid sequence of SEQ ID NO: 138. In some embodiments, the amino acid sequence replaces positions 587 and 588, numbered according to SEQ ID NO: 138. In some embodiments, the amino acid sequence is present immediately subsequent to position 586 and replaces positions 587 and 588, numbered according to SEQ ID NO: 138.

[1254] In some embodiments, loop (e.g., loop VIII) is used interchangeably herein with the term variable region (e.g., variable region VIII), or VR (e.g., VR-VIII). In some embodiments loop VIII comprises positions 580-599 (e.g., amino acids VATNHQSAQAQAQTGWVQNQ (SEQ ID NO: 1195)), numbered according to SEQ ID NO: 138. In some embodiments, loop VIII comprises positions 582-593 (e.g., amino acids TNHQSAQAQAQT (SEQ ID NO: 1196)), numbered according to SEQ ID NO: 138. In some embodiments loop VIII comprises positions 587-593 (e.g., amino acids AQAQAQT (SEQ ID NO: 1197)), numbered according to SEQ ID NO: 138. In some embodiments loop VIII comprises positions 587-590 (e.g., amino acids AQAQ (SEQ ID NO: 4737)), numbered according to SEQ ID NO: 138. In some embodiments, loop VIII or variable region VIII (VR-VIII) is as described in DiMattia et al. “Structural Insights into the Unique Properties of the Adeno-Associated Virus Serotype 9,” Journal of Virology, 12(86):6947-6958 (the contents of which are hereby incorporated by reference in their entirety), e.g., comprising positions 581-593 (e.g., ATNHQSAQAQAQT (SEQ ID NO: 1198)), numbered according to SEQ ID NO: 138.

[1255] In some embodiments, the AAV capsid variant comprises the amino acid sequence of PLNGAVHLY (SEQ ID NO: 3648), or an amino acid sequence having at least one, two, or three but no more than four modifications, e.g., substitutions, relative to the amino acid sequence of PLNGAVHLY (SEQ ID NO: 3648), optionally wherein position 7 is H.

[1256] In some embodiments, the AAV capsid variant comprises the amino acid sequence of IVMNSLK (SEQ ID NO: 3651), or an amino acid sequence having at least one, two, or three modifications but no more than four modifications, e.g., substitutions, relative to the amino acid sequence of IVMNSLK (SEQ ID NO: 3651).

[1257] In some embodiments, the AAV capsid variant comprises the amino acid sequence of any of SEQ ID NO: 1725-3622. In some embodiments, the AAV capsid variant comprises the amino acid sequence of any of SEQ ID NO: 3648-3659. In some embodiments, the amino acid sequence is present in loop VIII of an AAV capsid variant described herein. In some embodiments, the amino acid sequence is present immediately subsequent to position 586, relative to a reference sequence numbered according to the amino acid sequence of SEQ ID NO: 138. In some embodiments, the amino acid sequence is present immediately subsequent to position 588, relative to a reference sequence numbered according to the amino acid sequence of SEQ ID NO: 138. In some embodiments, the amino acid sequence is present immediately subsequent to position 589, relative to a reference sequence numbered according to the amino acid sequence of SEQ ID NO: 138.

[1258] In some embodiments, the AAV capsid variant (e.g., an AAV capsid variant described herein), comprises an amino acid sequence encoded by the nucleotide sequence of any one of SEQ ID NOs: 3660-3671, or a nucleotide sequence substantially identical (e.g., having at least 70%, 75%, 80%, 85%, 90%, 92%, 95%, 97%, 98%, or 99% sequence identity) thereto. In some embodiments, the AAV capsid, e.g., an AAV capsid variant described herein, comprises an amino acid sequence encoded by a nucleotide sequence comprising at least one, two, three, four, five, six, or seven modifications but no more than ten modifications of the nucleotide sequences of any of SEQ ID NOs: 3660-3671.

[1259] In some embodiments, the nucleotide sequence encoding the AAV capsid variant (e.g., an AAV capsid variant described herein), comprises the nucleotide sequence of any one of SEQ ID NOs: 3660-3671, or a nucleotide sequence substantially identical (e.g., having at least 70%, 75%, 80%, 85%, 90%, 92%, 95%, 97%, 98%, or 99% sequence identity) thereto. In some embodiments, nucleic acid sequence encoding the AAV capsid variant, e.g., an AAV capsid variant described herein, comprises a nucleotide sequence comprising at least one, two, three, four, five, six, or seven modifications but no more than ten modifications of the nucleotide sequences of any of SEQ ID NOs: 3660-3671.

[1260] In some embodiments, the nucleotide sequence encoding the AAV capsid variant (e.g., an AAV capsid variant described herein), comprises the nucleotide sequence of SEQ ID NO: 3660, or a nucleotide sequence substantially identical (e.g., having at least 70%, 75%, 80%, 85%, 90%, 92%, 95%, 97%, 98%, or 99% sequence identity) thereto. In some embodiments, the nucleic acid sequence encoding the AAV capsid variant comprises a nucleotide sequence comprising at least one, two, three, four, five, six, or seven modifications but no more than ten modifications of the nucleotide sequences of SEQ ID NO: 3660.

[1261] In some embodiments, the nucleotide sequence encoding the AAV capsid variant (e.g., an AAV capsid variant described herein), comprises the nucleotide sequence of SEQ ID NO: 3663, or a nucleotide sequence substantially identical (e.g., having at least 70%, 75%, 80%, 85%, 90%, 92%, 95%, 97%, 98%, or 99% sequence identity) thereto. In some embodiments, the nucleic acid sequence encoding the AAV capsid variant comprises a nucleotide sequence comprising at least one, two, three, four, five, six, or seven modifications but no more than ten modifications of the nucleotide sequences of SEQ ID NO: 3663.

[1262] In some embodiments, the AAV capsid variant comprises an amino acid residue other than “A” at position 587 and/or an amino acid residue other than “Q” at position 588, numbered according to SEQ ID NO: 138. In some embodiments, the AAV capsid variant comprises the amino acid P at position 587 and the amino acid L at position 588, numbered according to SEQ ID NO: 138. In some embodiments, the AAV capsid variant comprises the amino acid G at position 587 and the amino acid G at position 588, numbered according to SEQ ID NO: 138. In some embodiments, the AAV capsid variant comprises the substitutions A587P and Q588L, numbered according to SEQ ID NO: 138. In some embodiments, the AAV capsid variant comprises the substitutions A587G and Q588G, numbered according to SEQ ID NO: 138.

[1263] In some embodiments, the AAV capsid variant comprises the amino acid sequence of PLNGAVHLY (SEQ ID NO: 3648), wherein the amino acid sequence of PLNGAVHLY (SEQ ID NO: 3648) is present immediately subsequent to position 586, numbered according to the amino acid sequence of SEQ ID NO: 138. In some embodiments, the AAV capsid variant comprises the amino acid sequence of PLNGAVHLY (SEQ ID NO: 3648) wherein the amino acid sequence of PLNGAVHLY (SEQ ID NO: 3648) replaces positions 587 and 588, numbered according to the amino acid sequence of SEQ ID NO: 138. In some embodiments, the AAV capsid variant comprises the amino acid sequence of PLNGAVHLY (SEQ ID NO: 3648) wherein the amino acid sequence of PLNGAVHLY (SEQ ID NO: 3648) is present immediately subsequent to position 586 and replaces positions 587 and 588, numbered according to SEQ ID NO: 138. In some embodiments, the AAV capsid variant comprises the amino acid sequence of PLNGAVHLY (SEQ ID NO: 3648), wherein the amino acid sequence of PLNGAVHLY (SEQ ID NO: 3648) is present immediately subsequent to position 586, numbered according to the amino acid sequence of SEQ ID NO: 138, and further comprises a deletion of the amino acids AQ at positions 587-588, numbered according to SEQ ID NO: 138.

[1264] In some embodiments, the AAV capsid variant comprises the amino acid P at position 587, the amino acid L at position 588, and further comprises the amino acid sequence NGAVHLY (SEQ ID NO: 3689), which is present immediately subsequent to position 588, numbered according to SEQ ID NO: 138.

[1265] In some embodiments, the AAV capsid variant comprises the amino acid sequence of GGTLAVVSL (SEQ ID NO: 3654), wherein the amino acid sequence of GGTLAVVSL (SEQ ID NO: 3654) is present immediately subsequent to position 586, numbered according to the amino acid sequence of SEQ ID NO: 138. In some embodiments, the AAV capsid variant comprises the amino acid sequence of GGTLAVVSL (SEQ ID NO: 3654), wherein the amino acid sequence of GGTLAVVSL (SEQ ID NO: 3654) replaces positions 587 and 588, numbered according to the amino acid sequence of SEQ ID NO: 138. In some embodiments, the AAV capsid variant comprises the amino acid sequence of GGTLAVVSL (SEQ ID NO: 3654), wherein the amino acid sequence of GGTLAVVSL (SEQ ID NO: 3654) is present immediately subsequent to position 586 and replaces positions 587 and 588, numbered according to SEQ ID NO: 138. In some embodiments, the AAV capsid variant comprises the amino acid sequence of GGTLAVVSL (SEQ ID NO: 3654), wherein the amino acid sequence of GGTLAVVSL (SEQ ID NO: 3654) is present immediately subsequent to position 586, numbered according to the amino acid sequence of SEQ ID NO: 138, and further comprises a deletion of the amino acids AQ at positions 587-588, numbered according to SEQ ID NO: 138.

[1266] In some embodiments, the AAV capsid variant comprises the amino acid G at position 587, the amino acid G at position 588, and further comprises the amino acid sequence TLAVVSL (SEQ ID NO: 5439), which is present immediately subsequent to position 588, numbered according to SEQ ID NO: 138.

[1267] In some embodiments, the AAV capsid variant comprises the amino acid sequence of IVMNSLK (SEQ ID NO: 3651), wherein the amino acid sequence of IVMNSLK (SEQ ID NO: 3651) is present immediately subsequent to position 588, relative to a reference sequence numbered according to the amino acid sequence of SEQ ID NO: 138.

[1268] In some embodiments, the AAV capsid variant comprises the amino acid sequence of any of SEQ ID NOs: 3649, 3650, 3652, 3653, or 3655-3659, wherein the amino acid sequence of any of the aforesaid sequences is present immediately subsequent to position 589, relative to a reference sequence numbered according to the amino acid sequence of SEQ ID NO: 138.

[1269] In some embodiments, the AAV capsid variant further comprises a substitution at position K449, e.g., a K449R substitution, numbered according to SEQ ID NO: 138. In some embodiments, the AAV capsid variant further comprises a modification, e.g., an insertion, substitution, and/or deletion in loop I, II, IV, and/or VI.

[1270] In some embodiments, the AAV capsid variant further comprises an amino acid sequence having at least one, two or three modifications but not more than 30, 20 or 10 modifications of the amino acid sequence of SEQ ID NO: 138. In some embodiments, the AAV capsid variant further comprises the amino acid sequence of SEQ ID NO: 138, or an amino acid sequence with at least 80% (e.g., at least about 85, 90, 95, 96, 97, 98, or 99%) sequence identity thereto. In some embodiments, the AAV capsid variant further comprises an amino acid sequence encoded by the nucleotide sequence of SEQ ID NO: 137, or a sequence with at least 80% (e.g., at least about 85, 90, 95, 96, 97, 98, or 99%) sequence identity thereto.

[1271] In some embodiments, an AAV capsid polypeptide, e.g., the AAV capsid variant, comprises immediately subsequent to position 586, 588, or 589, numbered relative to SEQ ID NO: 138 or corresponding to equivalent positions in any other AAV serotype (e.g., AAV1, AAV2, AAV3, AAV3b, AAV4, AAV5, AAV6, AAV7, AAV8, AAVrh8, AAVrh10, AAVrh32.33, AAVrh74, SEQ ID NO: 1139, SEQ ID NO: 1146, PHP.N, PHP.B, or an AAV serotype as provided in Table 6 of WO 2021/230987 (the contents of which are hereby incorporated by reference in their entirety)), at least 3, 4, 5, 6, 7, 8, 9, 10, 11, 12, 13, 14, 15, 16, 17, 18, or 19 consecutive amino acids of any of amino acid sequence provided in Tables 2A, 41, or 42. In some embodiments, the at least 3, 4, 5, 6, 7, 8, 9, 10, 11, 12, 13, 14, 15, 16, 17, 18, or 19 consecutive amino acids of any of amino acid sequence provided in Tables 2A, 41, or 42 replaces at least one, two, three, four, five, six, seven, eight, nine, ten, elven, or all of positions A587, Q588, A589, Q590, A591, Q592, T593, G594, W595, V596, Q597, and/or N598, numbered according to SEQ ID NO: 138 or corresponding to equivalent positions in any other AAV serotype (e.g., AAV1, AAV2, AAV3, AAV3b, AAV4, AAV5, AAV6, AAV7, AAV8, AAVrh8, AAVrh10, AAVrh32.33, AAVrh74, SEQ ID NO: 1139, SEQ ID NO: 1146, PHP.N, PHP.B, or an AAV serotype as provided in Table 6 of WO 2021/230987 (the contents of which are hereby incorporated by reference in their entirety). In some embodiments, the at least 3, 4, 5, 6, 7, 8, 9, 10, 11, 12, 13, 14, 15, 16, 17, 18, or 19 consecutive amino acids of any of amino acid sequence provided in Tables 2A, 41, or 42 replaces positions A587, Q588, or both positions A587 and Q588, numbered according to SEQ ID NO: 138 or corresponding to equivalent positions in any other AAV serotype (e.g., AAV1, AAV2, AAV3, AAV3b, AAV4, AAV5, AAV6, AAV7, AAV8, AAVrh8, AAVrh10, AAVrh32.33, AAVrh74, SEQ ID NO: 1139, SEQ ID NO: 1146, PHP.N, PHP.B, or an AAV serotype as provided in Table 6 of WO 2021/230987 (the contents of which are hereby incorporated by reference in their entirety). In some embodiments, the AAV capsid variant comprises an amino acid other than the wild-type, e.g., native, amino acid, at one, two, three, four, five, six, seven, eight, nine, ten, eleven or all of positions A587, Q588, A589, Q590, A591, Q592, T593, G594, W595, V596, Q597, and/or N598, numbered according to SEQ ID NO: 138 or corresponding to equivalent positions in any other AAV serotype (e.g., AAV1, AAV2, AAV3, AAV3b, AAV4, AAV5, AAV6, AAV7, AAV8, AAVrh8, AAVrh10, AAVrh32.33, AAVrh74, SEQ ID NO: 1139, SEQ ID NO: 1146, PHP.N, PHP.B, or an AAV serotype as provided in Table 6 of WO 2021/230987 (the contents of which are hereby incorporated by reference in their entirety). In some embodiments, the AAV capsid variant comprises an amino acid other than the wild-type, e.g., native, amino acid, at position A587, Q588, or both positions A587 and Q588, numbered according to SEQ ID NO: 138 or corresponding to equivalent positions in any other AAV serotype (e.g., AAV1, AAV2, AAV3, AAV3b, AAV4, AAV5, AAV6, AAV7, AAV8, AAVrh8, AAVrh10, AAVrh32.33, AAVrh74, SEQ ID NO: 1139, SEQ ID NO: 1146, PHP.N, PHP.B, or an AAV serotype as provided in Table 6 of WO 2021/230987 (the contents of which are hereby incorporated by reference in their entirety)). In some embodiments, the AAV capsid variant comprises a modification, e.g., substitution, at one, two, three, four, five, six, seven, eight, nine, ten eleven or all of positions A587, Q588, A589, Q590, A591, Q592, T593, G594, W595, V596, Q597, and/or N598, numbered according to SEQ ID NO: 138 or corresponding to equivalent positions in any other AAV serotype (e.g., AAV1, AAV2, AAV3, AAV3b, AAV4, AAV5, AAV6, AAV7, AAV8, AAVrh8, AAVrh10, AAVrh32.33, AAVrh74, SEQ ID NO: 1139, SEQ ID NO: 1146, PHP.N, PHP.B, or an AAV serotype as provided in Table 6 of WO 2021/230987 (the contents of which are hereby incorporated by reference in their entirety). In some embodiments, the AAV capsid variant comprises a modification, e.g., substitution, at position A587, Q588, or both positions A587 and Q588, numbered according to SEQ ID NO: 138 or corresponding to equivalent positions in any other AAV serotype (e.g., AAV1, AAV2, AAV3, AAV3b, AAV4, AAV5, AAV6, AAV7, AAV8, AAVrh8, AAVrh10, AAVrh32.33, AAVrh74, SEQ ID NO: 1139, SEQ ID NO: 1146, PHP.N, PHP.B, or an AAV serotype as provided in Table 6 of WO 2021/230987 (the contents of which are hereby incorporated by reference in their entirety).

[1272] In some embodiments, an AAV capsid variant of the present disclosure comprises an amino acid sequence as described herein, e.g. an amino acid sequence of an AAV capsid variant chosen from TTD-001, TTD-002, TTD-003, TTD-004, TTD-005, TTD-006, TTD-007, TTD-008, TTD-009, TTD-010, TTD-011, TTD-012, TTD-013, or TTD-014, e.g., as described in Tables 37A and 38A. In some embodiments, the AAV capsid variant comprises a sequence as described in WO2021/230987, the contents of which are hereby incorporated by reference in its entirety.

[1273] In some embodiments, an AAV capsid variant comprises a VP1, VP2, and/or VP3 protein comprising an amino acid sequence described herein, e.g., an amino acid sequence of an AAV capsid variant chosen from TTD-001, TTD-002, TTD-003, TTD-004, TTD-005, TTD-006, TTD-007, TTD-008, TTD-009, TTD-010, TTD-011, TTD-012, TTD-013, or TTD-014, e.g., as described in Tables 37A and 38A.

[1274] In some embodiments, an AAV capsid variant described herein comprises an amino acid sequence encoded by a nucleotide sequence as described herein, e.g., a nucleotide sequence of an AAV capsid variant chosen from TTD-001, TTD-002, TTD-003, TTD-004, TTD-005, TTD-006, TTD-007, TTD-008, TTD-009, TTD-010, TTD-011, TTD-012, TTD-013, or TTD-014, e.g., as described in Tables 37A and 39A.

[1275] In some embodiments, a polynucleotide encoding an AAV capsid variant of the present disclosure comprises a nucleotide sequence described herein, e.g., a nucleotide sequence of an AAV capsid variant chosen from TTD-001, TTD-002, TTD-003, TTD-004, TTD-005, TTD-006, TTD-007, TTD-008, TTD-009, TTD-010, TTD-011, TTD-012, TTD-013, or TTD-014, e.g., as described in Tables 37A and 39A.

[1276] In some embodiments, insertion of a nucleic acid sequence, targeting nucleic acid sequence, or a peptide into a parent AAV sequence generates the non-limiting exemplary full length capsid sequences, e.g., an AAV capsid variant, as described in Tables 37A, 38A, and 39A.

TABLE 37A
Exemplary full length capsid sequences

| | | VP1 | Peptide | DNA sequence |
|---|---|---|---|---|
| | VP1 DNA | Amino Acid | SEQ | encoding Peptide |
| Name | SEQ ID NO: | SEQ ID NO: | ID NO: | SEQ ID NO: |
| TTD-001 | 3623 | 3636 | 3648 | 3660 |
| TTD-002 | 3624 or 3625 | 3637 | 3649 | 3661 |
| TTD-003 | 3626 | 3638 | 3650 | 3662 |
| TTD-004 | 3627 | 3639 | 3651 | 3663 |
| TTD-005 | 3628 | 3640 | 3652 | 3664 |
| TTD-006 | 3629 | 3641 | 3653 | 3665 |
| TTD-007 | 3630 | 3642 | 3654 | 3666 |
| TTD-008 | 3631 | 3643 | 3655 | 3667 |
| TTD-009 | 3632 | 3644 | 3656 | 3668 |
| TTD-010 | 3633 | 3645 | 3657 | 3669 |
| TTD-011 | 3634 | 3646 | 3658 | 3670 |
| TTD-012 | 3635 | 3647 | 3659 | 3671 |
| TTD-013 | 4 | 5 | 314 | 6 |
| TTD-014 | 7 | 8 | 566 | 9 |

TABLE 38A
Exemplary full length capsid amino acid sequences

| | SEQ | |
|---|---|---|
| Name and | ID | |
| Annotation | NO: | Amino Acid Sequence |
| TTD-001 | 3636 | MAADGYLPDWLEDNLSEGIREWWALKPGAPQPKANQQHQDNARGLVLPGYKYLG |
| 9 mer peptide | | PGNGLDKGEPVNAADAAALEHDKAYDQQLKAGDNPYLKYNHADAEFQERLKEDT |
| underlined, starts | | SFGGNLGRAVFQAKKRLLEPLGLVEEAAKTAPGKKRPVEQSPQEPDSSAGIGKS |
| at position 587 | | GAQPAKKRLNFGQTGDTESVPDPQPIGEPPAAPSGVGSLTMASGGGAPVADNNE |
| (immediately | | GADGVGSSSGNWHCDSQWLGDRVITTSTRTWALPTYNNHLYKQISNSTSGGSSN |
| subsequent to | | DNAYFGYSTPWGYFDFNRFHCHFSPRDWQRLINNNWGFRPKRLNFKLFNIQVKE |
| position 586); | | VTDNNGVKTIANNLTSTVQVFTDSDYQLPYVLGSAHEGCLPPFPADVFMIPQYG |
| 743 aa | | YLTLNDGSQAVGRSSFYCLEYFPSQMLRTGNNFQFSYEFENVPFHSSYAHSQSL |
| | | DRLMNPLIDQYLYYLSKTINGSGQNQQTLKFSVAGPSNMAVQGRNYIPGPSYRQ |
| | | QRVSTTVTQNNNSEFAWPGASSWALNGRNSLMNPGPAMASHKEGEDRFFPLSGS |
| | | LIFGKQGTGRDNVDADKVMITNEEEIKTTNPVATESYGQVATNHQSPLNGAVHL |
| | | YAQAQTGWVQNQGILPGMVWQDRDVYLQGPIWAKIPHTDGNFHPSPLMGGFGMK |
| | | HPPPQILIKNTPVPADPPTAFNKDKLNSFITQYSTGQVSVEIEWELQKENSKRW |
| | | NPEIQYTSNYYKSNNVEFAVNTEGVYSEPRPIGTRYLTRNL |
| TTD-002 | 3637 | MAADGYLPDWLEDNLSEGIREWWALKPGAPQPKANQQHQDNARGLVLPGYKYLG |
| 7 mer peptide | | PGNGLDKGEPVNAADAAALEHDKAYDQQLKAGDNPYLKYNHADAEFQERLKEDT |
| underlined, starts | | SFGGNLGRAVFQAKKRLLEPLGLVEEAAKTAPGKKRPVEQSPQEPDSSAGIGKS |
| at position 590 | | GAQPAKKRLNFGQTGDTESVPDPQPIGEPPAAPSGVGSLTMASGGGAPVADNNE |
| (immediately | | GADGVGSSSGNWHCDSQWLGDRVITTSTRTWALPTYNNHLYKQISNSTSGGSSN |
| subsequent to | | DNAYFGYSTPWGYFDFNRFHCHFSPRDWQRLINNNWGFRPKRLNFKLFNIQVKE |
| position 589); | | VTDNNGVKTIANNLTSTVQVFTDSDYQLPYVLGSAHEGCLPPFPADVFMIPQYG |
| 743 aa | | YLTLNDGSQAVGRSSFYCLEYFPSQMLRTGNNFQFSYEFENVPFHSSYAHSQSL |
| | | DRLMNPLIDQYLYYLSKTINGSGQNQQTLKFSVAGPSNMAVQGRNYIPGPSYRQ |
| | | QRVSTTVTQNNNSEFAWPGASSWALNGRNSLMNPGPAMASHKEGEDRFFPLSGS |
| | | LIFGKQGTGRDNVDADKVMITNEEEIKTTNPVATESYGQVATNHQSAQARDSPK |
| | | GWQAQTGWVQNQGILPGMVWQDRDVYLQGPIWAKIPHTDGNFHPSPLMGGFGMK |
| | | HPPPQILIKNTPVPADPPTAFNKDKLNSFITQYSTGQVSVEIEWELQKENSKRW |
| | | NPEIQYTSNYYKSNNVEFAVNTEGVYSEPRPIGTRYLTRNL |
| TTD-003 | 3638 | MAADGYLPDWLEDNLSEGIREWWALKPGAPQPKANQQHQDNARGLVLPGYKYLG |
| 7 mer peptide | | PGNGLDKGEPVNAADAAALEHDKAYDQQLKAGDNPYLKYNHADAEFQERLKEDT |
| underlined, starts | | SFGGNLGRAVFQAKKRLLEPLGLVEEAAKTAPGKKRPVEQSPQEPDSSAGIGKS |
| at position 590 | | GAQPAKKRLNFGQTGDTESVPDPQPIGEPPAAPSGVGSLTMASGGGAPVADNNE |
| (immediately | | GADGVGSSSGNWHCDSQWLGDRVITTSTRTWALPTYNNHLYKQISNSTSGGSSN |
| subsequent to | | DNAYFGYSTPWGYFDFNRFHCHFSPRDWQRLINNNWGFRPKRLNFKLFNIQVKE |
| position 589); | | VTDNNGVKTIANNLTSTVQVFTDSDYQLPYVLGSAHEGCLPPFPADVFMIPQYG |
| 743 aa | | YLTLNDGSQAVGRSSFYCLEYFPSQMLRTGNNFQFSYEFENVPFHSSYAHSQSL |
| | | DRLMNPLIDQYLYYLSKTINGSGQNQQTLKFSVAGPSNMAVQGRNYIPGPSYRQ |
| | | QRVSTTVTQNNNSEFAWPGASSWALNGRNSLMNPGPAMASHKEGEDRFFPLSGS |
| | | LIFGKQGTGRDNVDADKVMITNEEEIKTTNPVATESYGQVATNHQSAQAYSTDV |
| | | RMQAQTGWVQNQGILPGMVWQDRDVYLQGPIWAKIPHTDGNFHPSPLMGGFGMK |
| | | HPPPQILIKNTPVPADPPTAFNKDKLNSFITQYSTGQVSVEIEWELQKENSKRW |
| | | NPEIQYTSNYYKSNNVEFAVNTEGVYSEPRPIGTRYLTRNL |
| TTD-004 | 3639 | MAADGYLPDWLEDNLSEGIREWWALKPGAPQPKANQQHQDNARGLVLPGYKYLG |
| 7 mer peptide | | PGNGLDKGEPVNAADAAALEHDKAYDQQLKAGDNPYLKYNHADAEFQERLKEDT |
| underlined, starts | | SFGGNLGRAVFQAKKRLLEPLGLVEEAAKTAPGKKRPVEQSPQEPDSSAGIGKS |
| at position 589 | | GAQPAKKRLNFGQTGDTESVPDPQPIGEPPAAPSGVGSLTMASGGGAPVADNNE |
| (immediately | | GADGVGSSSGNWHCDSQWLGDRVITTSTRTWALPTYNNHLYKQISNSTSGGSSN |
| subsequent to | | DNAYFGYSTPWGYFDFNRFHCHFSPRDWQRLINNNWGFRPKRLNFKLFNIQVKE |
| position 588); | | VTDNNGVKTIANNLTSTVQVFTDSDYQLPYVLGSAHEGCLPPFPADVFMIPQYG |
| 743 aa | | YLTLNDGSQAVGRSSFYCLEYFPSQMLRTGNNFQFSYEFENVPFHSSYAHSQSL |
| | | DRLMNPLIDQYLYYLSKTINGSGQNQQTLKFSVAGPSNMAVQGRNYIPGPSYRQ |
| | | QRVSTTVTQNNNSEFAWPGASSWALNGRNSLMNPGPAMASHKEGEDRFFPLSGS |
| | | LIFGKQGTGRDNVDADKVMITNEEEIKTTNPVATESYGQVATNHQSAQIVMNSL |
| | | KAQAQTGWVQNQGILPGMVWQDRDVYLQGPIWAKIPHTDGNFHPSPLMGGFGMK |
| | | HPPPQILIKNTPVPADPPTAFNKDKLNSFITQYSTGQVSVEIEWELQKENSKRW |
| | | NPEIQYTSNYYKSNNVEFAVNTEGVYSEPRPIGTRYLTRNL |
| TTD-005 | 3640 | MAADGYLPDWLEDNLSEGIREWWALKPGAPQPKANQQHQDNARGLVLPGYKYLG |
| 7 mer peptide | | PGNGLDKGEPVNAADAAALEHDKAYDQQLKAGDNPYLKYNHADAEFQERLKEDT |
| underlined, starts | | SFGGNLGRAVFQAKKRLLEPLGLVEEAAKTAPGKKRPVEQSPQEPDSSAGIGKS |
| at position 590 | | GAQPAKKRLNFGQTGDTESVPDPQPIGEPPAAPSGVGSLTMASGGGAPVADNNE |
| (immediately | | GADGVGSSSGNWHCDSQWLGDRVITTSTRTWALPTYNNHLYKQISNSTSGGSSN |
| subsequent to | | DNAYFGYSTPWGYFDFNRFHCHFSPRDWQRLINNNWGFRPKRLNFKLFNIQVKE |
| position 589); | | VTDNNGVKTIANNLTSTVQVFTDSDYQLPYVLGSAHEGCLPPFPADVFMIPQYG |
| 743 aa | | YLTLNDGSQAVGRSSFYCLEYFPSQMLRTGNNFQFSYEFENVPFHSSYAHSQSL |
| | | DRLMNPLIDQYLYYLSKTINGSGQNQQTLKFSVAGPSNMAVQGRNYIPGPSYRQ |
| | | QRVSTTVTQNNNSEFAWPGASSWALNGRNSLMNPGPAMASHKEGEDRFFPLSGS |
| | | LIFGKQGTGRDNVDADKVMITNEEEIKTTNPVATESYGQVATNHQSAQARESPR |
| | | GLQAQTGWVQNQGILPGMVWQDRDVYLQGPIWAKIPHTDGNFHPSPLMGGFGMK |
| | | HPPPQILIKNTPVPADPPTAFNKDKLNSFITQYSTGQVSVEIEWELQKENSKRW |
| | | NPEIQYTSNYYKSNNVEFAVNTEGVYSEPRPIGTRYLTRNL |
| TTD-006 | 3641 | MAADGYLPDWLEDNLSEGIREWWALKPGAPQPKANQQHQDNARGLVLPGYKYLG |
| 7 mer peptide | | PGNGLDKGEPVNAADAAALEHDKAYDQQLKAGDNPYLKYNHADAEFQERLKEDT |
| underlined, starts | | SFGGNLGRAVFQAKKRLLEPLGLVEEAAKTAPGKKRPVEQSPQEPDSSAGIGKS |
| at position 590 | | GAQPAKKRLNFGQTGDTESVPDPQPIGEPPAAPSGVGSLTMASGGGAPVADNNE |
| (immediately | | GADGVGSSSGNWHCDSQWLGDRVITTSTRTWALPTYNNHLYKQISNSTSGGSSN |
| subsequent to 589); | | DNAYFGYSTPWGYFDFNRFHCHFSPRDWQRLINNNWGFRPKRLNFKLFNIQVKE |
| 743 aa | | VTDNNGVKTIANNLTSTVQVFTDSDYQLPYVLGSAHEGCLPPFPADVFMIPQYG |
| | | YLTLNDGSQAVGRSSFYCLEYFPSQMLRTGNNFQFSYEFENVPFHSSYAHSQSL |
| | | DRLMNPLIDQYLYYLSKTINGSGQNQQTLKFSVAGPSNMAVQGRNYIPGPSYRQ |
| | | QRVSTTVTQNNNSEFAWPGASSWALNGRNSLMNPGPAMASHKEGEDRFFPLSGS |
| | | LIFGKQGTGRDNVDADKVMITNEEEIKTTNPVATESYGQVATNHQSAQASFNDT |
| | | RAQAQTGWVQNQGILPGMVWQDRDVYLQGPIWAKIPHTDGNFHPSPLMGGFGMK |
| | | HPPPQILIKNTPVPADPPTAFNKDKLNSFITQYSTGQVSVEIEWELQKENSKRW |
| | | NPEIQYTSNYYKSNNVEFAVNTEGVYSEPRPIGTRYLTRNL |
| TTD-007 | 3642 | MAADGYLPDWLEDNLSEGIREWWALKPGAPQPKANQQHQDNARGLVLPGYKYLG |
| 9 mer peptide | | PGNGLDKGEPVNAADAAALEHDKAYDQQLKAGDNPYLKYNHADAEFQERLKEDT |
| underlined, starts | | SFGGNLGRAVFQAKKRLLEPLGLVEEAAKTAPGKKRPVEQSPQEPDSSAGIGKS |
| at position 587 | | GAQPAKKRLNFGQTGDTESVPDPQPIGEPPAAPSGVGSLTMASGGGAPVADNNE |
| (immediately | | GADGVGSSSGNWHCDSQWLGDRVITTSTRTWALPTYNNHLYKQISNSTSGGSSN |
| subsequent to | | DNAYFGYSTPWGYFDFNRFHCHFSPRDWQRLINNNWGFRPKRLNFKLFNIQVKE |
| position 586); | | VTDNNGVKTIANNLTSTVQVFTDSDYQLPYVLGSAHEGCLPPFPADVFMIPQYG |
| 743 aa | | YLTLNDGSQAVGRSSFYCLEYFPSQMLRTGNNFQFSYEFENVPFHSSYAHSQSL |
| | | DRLMNPLIDQYLYYLSKTINGSGQNQQTLKFSVAGPSNMAVQGRNYIPGPSYRQ |
| | | QRVSTTVTQNNNSEFAWPGASSWALNGRNSLMNPGPAMASHKEGEDRFFPLSGS |
| | | LIFGKQGTGRDNVDADKVMITNEEEIKTTNPVATESYGQVATNHQSGGTLAVVS |
| | | LAQAQTGWVQNQGILPGMVWQDRDVYLQGPIWAKIPHTDGNFHPSPLMGGFGMK |
| | | HPPPQILIKNTPVPADPPTAFNKDKLNSFITQYSTGQVSVEIEWELQKENSKRW |
| | | NPEIQYTSNYYKSNNVEFAVNTEGVYSEPRPIGTRYLTRNL |
| TTD-008 | 3643 | MAADGYLPDWLEDNLSEGIREWWALKPGAPQPKANQQHQDNARGLVLPGYKYLG |
| 7 mer peptide | | PGNGLDKGEPVNAADAAALEHDKAYDQQLKAGDNPYLKYNHADAEFQERLKEDT |
| underlined, starts | | SFGGNLGRAVFQAKKRLLEPLGLVEEAAKTAPGKKRPVEQSPQEPDSSAGIGKS |
| at position 590 | | GAQPAKKRLNFGQTGDTESVPDPQPIGEPPAAPSGVGSLTMASGGGAPVADNNE |
| (immediately | | GADGVGSSSGNWHCDSQWLGDRVITTSTRTWALPTYNNHLYKQISNSTSGGSSN |
| subsequent to 589); | | DNAYFGYSTPWGYFDFNRFHCHFSPRDWQRLINNNWGFRPKRLNFKLFNIQVKE |
| 743 aa | | VTDNNGVKTIANNLTSTVQVFTDSDYQLPYVLGSAHEGCLPPFPADVFMIPQYG |
| | | YLTLNDGSQAVGRSSFYCLEYFPSQMLRTGNNFQFSYEFENVPFHSSYAHSQSL |
| | | DRLMNPLIDQYLYYLSKTINGSGQNQQTLKFSVAGPSNMAVQGRNYIPGPSYRQ |
| | | QRVSTTVTQNNNSEFAWPGASSWALNGRNSLMNPGPAMASHKEGEDRFFPLSGS |
| | | LIFGKQGTGRDNVDADKVMITNEEEIKTTNPVATESYGQVATNHQSAQAYGLPK |
| | | GPQAQTGWVQNQGILPGMVWQDRDVYLQGPIWAKIPHTDGNFHPSPLMGGFGMK |
| | | HPPPQILIKNTPVPADPPTAFNKDKLNSFITQYSTGQVSVEIEWELQKENSKRW |
| | | NPEIQYTSNYYKSNNVEFAVNTEGVYSEPRPIGTRYLTRNL |
| TTD-009 | 3644 | MAADGYLPDWLEDNLSEGIREWWALKPGAPQPKANQQHQDNARGLVLPGYKYLG |
| 7 mer peptide | | PGNGLDKGEPVNAADAAALEHDKAYDQQLKAGDNPYLKYNHADAEFQERLKEDT |
| underlined, starts | | SFGGNLGRAVFQAKKRLLEPLGLVEEAAKTAPGKKRPVEQSPQEPDSSAGIGKS |
| at position 590 | | GAQPAKKRLNFGQTGDTESVPDPQPIGEPPAAPSGVGSLTMASGGGAPVADNNE |
| (immediately | | GADGVGSSSGNWHCDSQWLGDRVITTSTRTWALPTYNNHLYKQISNSTSGGSSN |
| subsequent to 589); | | DNAYFGYSTPWGYFDFNRFHCHFSPRDWQRLINNNWGFRPKRLNFKLFNIQVKE |
| 743 aa | | VTDNNGVKTIANNLTSTVQVFTDSDYQLPYVLGSAHEGCLPPFPADVFMIPQYG |
| | | YLTLNDGSQAVGRSSFYCLEYFPSQMLRTGNNFQFSYEFENVPFHSSYAHSQSL |
| | | DRLMNPLIDQYLYYLSKTINGSGQNQQTLKFSVAGPSNMAVQGRNYIPGPSYRQ |
| | | QRVSTTVTQNNNSEFAWPGASSWALNGRNSLMNPGPAMASHKEGEDRFFPLSGS |
| | | LIFGKQGTGRDNVDADKVMITNEEEIKTTNPVATESYGQVATNHQSAQASTGTL |
| | | RLQAQTGWVQNQGILPGMVWQDRDVYLQGPIWAKIPHTDGNFHPSPLMGGFGMK |
| | | HPPPQILIKNTPVPADPPTAFNKDKLNSFITQYSTGQVSVEIEWELQKENSKRW |
| | | NPEIQYTSNYYKSNNVEFAVNTEGVYSEPRPIGTRYLTRNL |
| TTD-010 | 3645 | MAADGYLPDWLEDNLSEGIREWWALKPGAPQPKANQQHQDNARGLVLPGYKYLG |
| 7 mer peptide | | PGNGLDKGEPVNAADAAALEHDKAYDQQLKAGDNPYLKYNHADAEFQERLKEDT |
| underlined, starts | | SFGGNLGRAVFQAKKRLLEPLGLVEEAAKTAPGKKRPVEQSPQEPDSSAGIGKS |
| at position 590 | | GAQPAKKRLNFGQTGDTESVPDPQPIGEPPAAPSGVGSLTMASGGGAPVADNNE |
| (immediately | | GADGVGSSSGNWHCDSQWLGDRVITTSTRTWALPTYNNHLYKQISNSTSGGSSN |
| subsequent to 589); | | DNAYFGYSTPWGYFDFNRFHCHFSPRDWQRLINNNWGFRPKRLNFKLFNIQVKE |
| 743 aa | | VTDNNGVKTIANNLTSTVQVFTDSDYQLPYVLGSAHEGCLPPFPADVFMIPQYG |
| | | YLTLNDGSQAVGRSSFYCLEYFPSQMLRTGNNFQFSYEFENVPFHSSYAHSQSL |
| | | DRLMNPLIDQYLYYLSKTINGSGQNQQTLKFSVAGPSNMAVQGRNYIPGPSYRQ |
| | | QRVSTTVTQNNNSEFAWPGASSWALNGRNSLMNPGPAMASHKEGEDRFFPLSGS |
| | | LIFGKQGTGRDNVDADKVMITNEEEIKTTNPVATESYGQVATNHQSAQAYSTDE |
| | | RMQAQTGWVQNQGILPGMVWQDRDVYLQGPIWAKIPHTDGNFHPSPLMGGFGMK |
| | | HPPPQILIKNTPVPADPPTAFNKDKLNSFITQYSTGQVSVEIEWELQKENSKRW |
| | | NPEIQYTSNYYKSNNVEFAVNTEGVYSEPRPIGTRYLTRNL |
| TTD-011 | 3646 | MAADGYLPDWLEDNLSEGIREWWALKPGAPQPKANQQHQDNARGLVLPGYKYLG |
| 7 mer peptide | | PGNGLDKGEPVNAADAAALEHDKAYDQQLKAGDNPYLKYNHADAEFQERLKEDT |
| underlined, starts | | SFGGNLGRAVFQAKKRLLEPLGLVEEAAKTAPGKKRPVEQSPQEPDSSAGIGKS |
| at position 590 | | GAQPAKKRLNFGQTGDTESVPDPQPIGEPPAAPSGVGSLTMASGGGAPVADNNE |
| (immediately | | GADGVGSSSGNWHCDSQWLGDRVITTSTRTWALPTYNNHLYKQISNSTSGGSSN |
| subsequent to 589); | | DNAYFGYSTPWGYFDFNRFHCHFSPRDWQRLINNNWGFRPKRLNFKLFNIQVKE |
| 743 aa | | VTDNNGVKTIANNLTSTVQVFTDSDYQLPYVLGSAHEGCLPPFPADVFMIPQYG |
| | | YLTLNDGSQAVGRSSFYCLEYFPSQMLRTGNNFQFSYEFENVPFHSSYAHSQSL |
| | | DRLMNPLIDQYLYYLSKTINGSGQNQQTLKFSVAGPSNMAVQGRNYIPGPSYRQ |
| | | QRVSTTVTQNNNSEFAWPGASSWALNGRNSLMNPGPAMASHKEGEDRFFPLSGS |
| | | LIFGKQGTGRDNVDADKVMITNEEEIKTTNPVATESYGQVATNHQSAQAYSTDE |
| | | RKQAQTGWVQNQGILPGMVWQDRDVYLQGPIWAKIPHTDGNFHPSPLMGGFGMK |
| | | HPPPQILIKNTPVPADPPTAFNKDKLNSFITQYSTGQVSVEIEWELQKENSKRW |
| | | NPEIQYTSNYYKSNNVEFAVNTEGVYSEPRPIGTRYLTRNL |
| TTD-012 | 3647 | MAADGYLPDWLEDNLSEGIREWWALKPGAPQPKANQQHQDNARGLVLPGYKYLG |
| 7 mer peptide | | PGNGLDKGEPVNAADAAALEHDKAYDQQLKAGDNPYLKYNHADAEFQERLKEDT |
| underlined, starts | | SFGGNLGRAVFQAKKRLLEPLGLVEEAAKTAPGKKRPVEQSPQEPDSSAGIGKS |
| at position 590 | | GAQPAKKRLNFGQTGDTESVPDPQPIGEPPAAPSGVGSLTMASGGGAPVADNNE |
| (immediately | | GADGVGSSSGNWHCDSQWLGDRVITTSTRTWALPTYNNHLYKQISNSTSGGSSN |
| subsequent to 589); | | DNAYFGYSTPWGYFDFNRFHCHFSPRDWQRLINNNWGFRPKRLNFKLFNIQVKE |
| 743 aa | | VTDNNGVKTIANNLTSTVQVFTDSDYQLPYVLGSAHEGCLPPFPADVFMIPQYG |
| | | YLTLNDGSQAVGRSSFYCLEYFPSQMLRTGNNFQFSYEFENVPFHSSYAHSQSL |
| | | DRLMNPLIDQYLYYLSKTINGSGQNQQTLKFSVAGPSNMAVQGRNYIPGPSYRQ |
| | | QRVSTTVTQNNNSEFAWPGASSWALNGRNSLMNPGPAMASHKEGEDRFFPLSGS |
| | | LIFGKQGTGRDNVDADKVMITNEEEIKTTNPVATESYGQVATNHQSAQAYVSSV |
| | | KMQAQTGWVQNQGILPGMVWQDRDVYLQGPIWAKIPHTDGNFHPSPLMGGFGMK |
| | | HPPPQILIKNTPVPADPPTAFNKDKLNSFITQYSTGQVSVEIEWELQKENSKRW |
| | | NPEIQYTSNYYKSNNVEFAVNTEGVYSEPRPIGTRYLTRNL |
| TTD-013 | 5 | MAADGYLPDWLEDNLSEGIREWWALKPGAPQPKANQQHQDNARGLVLPGYKYLG |
| 9 mer peptide | | PGNGLDKGEPVNAADAAALEHDKAYDQQLKAGDNPYLKYNHADAEFQERLKEDT |
| underlined, starts | | SFGGNLGRAVFQAKKRLLEPLGLVEEAAKTAPGKKRPVEQSPQEPDSSAGIGKS |
| at position 587 | | GAQPAKKRLNFGQTGDTESVPDPQPIGEPPAAPSGVGSLTMASGGGAPVADNNE |
| (immediately | | GADGVGSSSGNWHCDSQWLGDRVITTSTRTWALPTYNNHLYKQISNSTSGGSSN |
| subsequent to | | DNAYFGYSTPWGYFDFNRFHCHFSPRDWQRLINNNWGFRPKRLNFKLFNIQVKE |
| position 586); | | VTDNNGVKTIANNLTSTVQVFTDSDYQLPYVLGSAHEGCLPPFPADVFMIPQYG |
| modification at | | YLTLNDGSQAVGRSSFYCLEYFPSQMLRTGNNFQFSYEFENVPFHSSYAHSQSL |
| position 604; | | DRLMNPLIDQYLYYLSKTINGSGQNQQTLKFSVAGPSNMAVQGRNYIPGPSYRQ |
| 743 aa | | QRVSTTVTQNNNSEFAWPGASSWALNGRNSLMNPGPAMASHKEGEDRFFPLSGS |
| | | LIFGKQGTGRDNVDADKVMITNEEEIKTTNPVATESYGQVATNHQSPLNGAVHL |
| | | YAQAQTGWVPNQGILPGMVWQDRDVYLQGPIWAKIPHTDGNFHPSPLMGGFGMK |
| | | HPPPQILIKNTPVPADPPTAFNKDKLNSFITQYSTGQVSVEIEWELQKENSKRW |
| | | NPEIQYTSNYYKSNNVEFAVNTEGVYSEPRPIGTRYLTRNL |
| TTD-014 | 8 | MAADGYLPDWLEDNLSEGIREWWALKPGAPQPKANQQHQDNARGLVLPGYKYLG |
| 9 mer peptide | | PGNGLDKGEPVNAADAAALEHDKAYDQQLKAGDNPYLKYNHADAEFQERLKEDT |
| underlined, starts | | SFGGNLGRAVFQAKKRLLEPLGLVEEAAKTAPGKKRPVEQSPQEPDSSAGIGKS |
| at position 587 | | GAQPAKKRLNFGQTGDTESVPDPQPIGEPPAAPSGVGSLTMASGGGAPVADNNE |
| (immediately | | GADGVGSSSGNWHCDSQWLGDRVITTSTRTWALPTYNNHLYKQISNSTSGGSSN |
| subsequent to | | DNAYFGYSTPWGYFDFNRFHCHFSPRDWQRLINNNWGFRPKRLNFKLFNIQVKE |
| position 586); | | VTDNNGVKTIANNLTSTVQVFTDSDYQLPYVLGSAHEGCLPPFPADVFMIPQYG |
| modifications at | | YLTLNDGSQAVGRSSFYCLEYFPSQMLRTGNNFQFSYEFENVPFHSSYAHSQSL |
| positions 600, 601, | | DRLMNPLIDQYLYYLSKTINGSGQNQQTLKFSVAGPSNMAVQGRNYIPGPSYRQ |
| 602, and 604 | | QRVSTTVTQNNNSEFAWPGASSWALNGRNSLMNPGPAMASHKEGEDRFFPLSGS |
| 743 aa | | LIFGKQGTGRDNVDADKVMITNEEEIKTTNPVATESYGQVATNHQSPLNGAVHL |
| | | YAQAQLSPVKNQGILPGMVWQDRDVYLQGPIWAKIPHTDGNFHPSPLMGGFGMK |
| | | HPPPQILIKNTPVPADPPTAFNKDKLNSFITQYSTGQVSVEIEWELQKENSKRW |
| | | NPEIQYTSNYYKSNNVEFAVNTEGVYSEPRPIGTRYLTRNL |

TABLE 39A
Exemplary full length capsid nucleic acid sequences

| | SEQ | |
|---|---|---|
| Name and | ID | |
| Annotation | NO: | NT Sequence |
| TTD-001 | 3623 | ATGGCTGCCGATGGTTATCTTCCAGATTGGCTCGAGGACAACCTTAGTGAAGGAATTCGC |
| 9 mer peptide | | GAGTGGTGGGCTTTGAAACCTGGAGCCCCTCAACCCAAGGCAAATCAACAACATCAAGAC |
| underlined | | AACGCTCGAGGTCTTGTGCTTCCGGGTTACAAATACCTTGGACCCGGCAACGGACTCGAC |
| | | AAGGGGGAGCCGGTCAACGCAGCAGACGCGGCGGCCCTCGAGCACGACAAGGCCTACGAC |
| | | CAGCAGCTCAAGGCCGGAGACAACCCGTACCTCAAGTACAACCACGCCGACGCCGAGTTC |
| | | CAGGAGCGGCTCAAAGAAGATACGTCTTTTGGGGGCAACCTCGGGCGAGCAGTCTTCCAG |
| | | GCCAAAAAGAGGCTTCTTGAACCTCTTGGTCTGGTTGAGGAAGCGGCTAAGACGGCTCCT |
| | | GGAAAGAAGAGGCCTGTAGAGCAGTCTCCTCAGGAACCGGACTCCTCCGCGGGTATTGGC |
| | | AAATCGGGTGCACAGCCCGCTAAAAAGAGACTCAATTTCGGTCAGACTGGCGACACAGAG |
| | | TCAGTCCCAGACCCTCAACCAATCGGAGAACCTCCCGCAGCCCCCTCAGGTGTGGGATCT |
| | | CTTACAATGGCTTCAGGTGGTGGCGCACCAGTGGCAGACAATAACGAAGGTGCCGATGGA |
| | | GTGGGTAGTTCCTCGGGAAATTGGCATTGCGATTCCCAATGGCTGGGGGACAGAGTCATC |
| | | ACCACCAGCACCCGAACCTGGGCCCTGCCCACCTACAACAATCACCTCTACAAGCAAATC |
| | | TCCAACAGCACATCTGGAGGATCTTCAAATGACAACGCCTACTTCGGCTACAGCACCCCC |
| | | TGGGGGTATTTTGACTTCAACAGATTCCACTGCCACTTCTCACCACGTGACTGGCAGCGA |
| | | CTCATCAACAACAACTGGGGATTCCGGCCTAAGCGACTCAACTTCAAGCTCTTCAACATT |
| | | CAGGTCAAAGAGGTTACGGACAACAATGGAGTCAAGACCATCGCCAATAACCTTACCAGC |
| | | ACGGTCCAGGTCTTCACGGACTCAGACTATCAGCTCCCGTACGTGCTCGGGTCGGCTCAC |
| | | GAGGGCTGCCTCCCGCCGTTCCCAGCGGACGTTTTCATGATTCCTCAGTACGGGTATCTG |
| | | ACGCTTAATGATGGAAGCCAGGCCGTGGGTCGTTCGTCCTTTTACTGCCTGGAATATTTC |
| | | CCGTCGCAAATGCTAAGAACGGGTAACAACTTCCAGTTCAGCTACGAGTTTGAGAACGTA |
| | | CCTTTCCATAGCAGCTACGCTCACAGCCAAAGCCTGGACCGACTAATGAATCCACTCATC |
| | | GACCAATACTTGTACTATCTCTCAAAGACTATTAACGGTTCTGGACAGAATCAACAAACG |
| | | CTAAAATTCAGTGTGGCCGGACCCAGCAACATGGCTGTCCAGGGAAGAAACTACATACCT |
| | | GGACCCAGCTACCGACAACAACGTGTCTCAACCACTGTGACTCAAAACAACAACAGCGAA |
| | | TTTGCTTGGCCTGGAGCTTCTTCTTGGGCTCTCAATGGACGTAATAGCTTGATGAATCCT |
| | | GGACCTGCTATGGCCAGCCACAAAGAAGGAGAGGACCGTTTCTTTCCTTTGTCTGGATCT |
| | | TTAATTTTTGGCAAACAAGGAACTGGAAGAGACAACGTGGATGCGGACAAAGTCATGATA |
| | | ACCAACGAAGAAGAAATTAAAACTACTAACCCGGTAGCAACGGAGTCCTATGGACAAGTG |
| | | GCCACAAACCACCAGAGTCCGCTTAATGGTGCCGTCCATCTTTATGCTCAGGCGCAGACC |
| | | GGCTGGGTTCAAAACCAAGGAATACTTCCGGGTATGGTTTGGCAGGACAGAGATGTGTAC |
| | | CTGCAAGGACCCATTTGGGCCAAAATTCCTCACACGGACGGCAACTTTCACCCTTCTCCG |
| | | CTGATGGGAGGGTTTGGAATGAAGCACCCGCCTCCTCAGATCCTCATCAAAAACACACCT |
| | | GTACCTGCCGATCCTCCAACGGCCTTCAACAAGGACAAGCTGAACTCTTTCATCACCCAG |
| | | TATTCTACTGGCCAAGTCAGCGTGGAGATCGAGTGGGAGCTGCAGAAGGAAAACAGCAAG |
| | | CGGTGGAACCCGGAGATCCAGTACACTTCCAACTATTACAAGTCTAATAATGTTGAATTT |
| | | GCTGTTAATACTGAAGGTGTATATAGTGAACCCCGCCCCATTGGCACCAGATACCTGACT |
| | | CGTAATCTGTAA |
| TTD-002 | 3624 | ATGGCTGCCGATGGTTATCTTCCAGATTGGCTCGAGGACAACCTTAGTGAAGGAATTCGC |
| 7 mer peptide | | GAGTGGTGGGCTTTGAAACCTGGAGCCCCTCAACCCAAGGCAAATCAACAACATCAAGAC |
| underlined | | AACGCTCGAGGTCTTGTGCTTCCGGGTTACAAATACCTTGGACCCGGCAACGGACTCGAC |
| | | AAGGGGGAGCCGGTCAACGCAGCAGACGCGGCGGCCCTCGAGCACGACAAGGCCTACGAC |
| | | CAGCAGCTCAAGGCCGGAGACAACCCGTACCTCAAGTACAACCACGCCGACGCCGAGTTC |
| | | CAGGAGCGGCTCAAAGAAGATACGTCTTTTGGGGGCAACCTCGGGCGAGCAGTCTTCCAG |
| | | GCCAAAAAGAGGCTTCTTGAACCTCTTGGTCTGGTTGAGGAAGCGGCTAAGACGGCTCCT |
| | | GGAAAGAAGAGGCCTGTAGAGCAGTCTCCTCAGGAACCGGACTCCTCCGCGGGTATTGGC |
| | | AAATCGGGTGCACAGCCCGCTAAAAAGAGACTCAATTTCGGTCAGACTGGCGACACAGAG |
| | | TCAGTCCCAGACCCTCAACCAATCGGAGAACCTCCCGCAGCCCCCTCAGGTGTGGGATCT |
| | | CTTACAATGGCTTCAGGTGGTGGCGCACCAGTGGCAGACAATAACGAAGGTGCCGATGGA |
| | | GTGGGTAGTTCCTCGGGAAATTGGCATTGCGATTCCCAATGGCTGGGGGACAGAGTCATC |
| | | ACCACCAGCACCCGAACCTGGGCCCTGCCCACCTACAACAATCACCTCTACAAGCAAATC |
| | | TCCAACAGCACATCTGGAGGATCTTCAAATGACAACGCCTACTTCGGCTACAGCACCCCC |
| | | TGGGGGTATTTTGACTTCAACAGATTCCACTGCCACTTCTCACCACGTGACTGGCAGCGA |
| | | CTCATCAACAACAACTGGGGATTCCGGCCTAAGCGACTCAACTTCAAGCTCTTCAACATT |
| | | CAGGTCAAAGAGGTTACGGACAACAATGGAGTCAAGACCATCGCCAATAACCTTACCAGC |
| | | ACGGTCCAGGTCTTCACGGACTCAGACTATCAGCTCCCGTACGTGCTCGGGTCGGCTCAC |
| | | GAGGGCTGCCTCCCGCCGTTCCCAGCGGACGTTTTCATGATTCCTCAGTACGGGTATCTG |
| | | ACGCTTAATGATGGAAGCCAGGCCGTGGGTCGTTCGTCCTTTTACTGCCTGGAATATTTC |
| | | CCGTCGCAAATGCTAAGAACGGGTAACAACTTCCAGTTCAGCTACGAGTTTGAGAACGTA |
| | | CCTTTCCATAGCAGCTACGCTCACAGCCAAAGCCTGGACCGACTAATGAATCCACTCATC |
| | | GACCAATACTTGTACTATCTCTCAAAGACTATTAACGGTTCTGGACAGAATCAACAAACG |
| | | CTAAAATTCAGTGTGGCCGGACCCAGCAACATGGCTGTCCAGGGAAGAAACTACATACCT |
| | | GGACCCAGCTACCGACAACAACGTGTCTCAACCACTGTGACTCAAAACAACAACAGCGAA |
| | | TTTGCTTGGCCTGGAGCTTCTTCTTGGGCTCTCAATGGACGTAATAGCTTGATGAATCCT |
| | | GGACCTGCTATGGCCAGCCACAAAGAAGGAGAGGACCGTTTCTTTCCTTTGTCTGGATCT |
| | | TTAATTTTTGGCAAACAAGGAACTGGAAGAGACAACGTGGATGCGGACAAAGTCATGATA |
| | | ACCAACGAAGAAGAAATTAAAACTACTAACCCGGTAGCAACGGAGTCCTATGGACAAGTG |
| | | GCCACAAACCACCAGAGTGCACAGGCTCGTGATTCTCCGAAGGGTTGGCAGGCGCAGACC |
| | | GGCTGGGTTCAAAACCAAGGAATACTTCCGGGTATGGTTTGGCAGGACAGAGATGTGTAC |
| | | CTGCAAGGACCCATTTGGGCCAAAATTCCTCACACGGACGGCAACTTTCACCCTTCTCCG |
| | | CTGATGGGAGGGTTTGGAATGAAGCACCCGCCTCCTCAGATCCTCATCAAAAACACACCT |
| | | GTACCTGCCGATCCTCCAACGGCCTTCAACAAGGACAAGCTGAACTCTTTCATCACCCAG |
| | | TATTCTACTGGCCAAGTCAGCGTGGAGATCGAGTGGGAGCTGCAGAAGGAAAACAGCAAG |
| | | CGGTGGAACCCGGAGATCCAGTACACTTCCAACTATTACAAGTCTAATAATGTTGAATTT |
| | | GCTGTTAATACTGAAGGTGTATATAGTGAACCCCGCCCCATTGGCACCAGATACCTGACT |
| | | CGTAATCTGTAA |
| | 3625 | ATGGCTGCCGATGGTTATCTTCCAGATTGGCTCGAGGACAACCTTAGTGAAGGAATTCGC |
| | | GAGTGGTGGGCTTTGAAACCTGGAGCCCCTCAACCCAAGGCAAATCAACAACATCAAGAC |
| | | AACGCTCGAGGTCTTGTGCTTCCGGGTTACAAATACCTTGGACCCGGCAACGGACTCGAC |
| | | AAGGGGGAGCCGGTCAACGCAGCAGACGCGGCGGCCCTCGAGCACGACAAGGCCTACGAC |
| | | CAGCAGCTCAAGGCCGGAGACAACCCGTACCTCAAGTACAACCACGCCGACGCCGAGTTC |
| | | CAGGAGCGGCTCAAAGAAGATACGTCTTTTGGGGGCAACCTCGGGCGAGCAGTCTTCCAG |
| | | GCCAAAAAGAGGCTTCTTGAACCTCTTGGTCTGGTTGAGGAAGCGGCTAAGACGGCTCCT |
| | | GGAAAGAAGAGGCCTGTAGAGCAGTCTCCTCAGGAACCGGACTCCTCCGCGGGTATTGGC |
| | | AAATCGGGTGCACAGCCCGCTAAAAAGAGACTCAATTTCGGTCAGACTGGCGACACAGAG |
| | | TCAGTCCCAGACCCTCAACCAATCGGAGAACCTCCCGCAGCCCCCTCAGGTGTGGGATCT |
| | | CTTACAATGGCTTCAGGTGGTGGCGCACCAGTGGCAGACAATAACGAAGGTGCCGATGGA |
| | | GTGGGTAGTTCCTCGGGAAATTGGCATTGCGATTCCCAATGGCTGGGGGACAGAGTCATC |
| | | ACCACCAGCACCCGAACCTGGGCCCTGCCCACCTACAACAATCACCTCTACAAGCAAATC |
| | | TCCAACAGCACATCTGGAGGATCTTCAAATGACAACGCCTACTTCGGCTACAGCACCCCC |
| | | TGGGGGTATTTTGACTTCAACAGATTCCACTGCCACTTCTCACCACGTGACTGGCAGCGA |
| | | CTCATCAACAACAACTGGGGATTCCGGCCTAAGCGACTCAACTTCAAGCTCTTCAACATT |
| | | CAGGTCAAAGAGGTTACGGACAACAATGGAGTCAAGACCATCGCCAATAACCTTACCAGC |
| | | ACGGTCCAGGTCTTCACGGACTCAGACTATCAGCTCCCGTACGTGCTCGGGTCGGCTCAC |
| | | GAGGGCTGCCTCCCGCCGTTCCCAGCGGACGTTTTCATGATTCCTCAGTACGGGTATCTG |
| | | ACGCTTAATGATGGAAGCCAGGCCGTGGGTCGTTCGTCCTTTTACTGCCTGGAATATTTC |
| | | CCGTCGCAAATGCTAAGAACGGGTAACAACTTCCAGTTCAGCTACGAGTTTGAGAACGTA |
| | | CCTTTCCATAGCAGCTACGCTCACAGCCAAAGCCTGGACCGACTAATGAATCCACTCATC |
| | | GACCAATACTTGTACTATCTCTCAAAGACTATTAACGGTTCTGGACAGAATCAACAAACG |
| | | CTAAAATTCAGTGTGGCCGGACCCAGCAACATGGCTGTCCAGGGAAGAAACTACATACCT |
| | | GGACCCAGCTACCGACAACAACGTGTCTCAACCACTGTGACTCAAAACAACAACAGCGAA |
| | | TTTGCTTGGCCTGGAGCTTCTTCTTGGGCTCTCAATGGACGTAATAGCTTGATGAATCCT |
| | | GGACCTGCTATGGCCAGCCACAAAGAAGGAGAGGACCGTTTCTTTCCTTTGTCTGGATCT |
| | | TTAATTTTTGGCAAACAAGGAACTGGAAGAGACAACGTGGATGCGGACAAAGTCATGATA |
| | | ACCAACGAAGAAGAAATTAAAACTACTAACCCGGTAGCAACGGAGTCCTATGGACAAGTG |
| | | GCCACAAACCACCAGAGTGCACAGGCTCGTGATTCTCCGAAGGGTTGGCAGGCGCAGACC |
| | | GGCTGGGTTCAAAACCAAGGAATACTTCCGGGTATGGTTTGGCAGGACAGAGATGTGTAC |
| | | CTGCAAGGACCCATTTGGGCCAAAATTCCTCACACGGACGGCAACTTTCACCCTTCTCCG |
| | | CTGATGGGAGGGTTTGGAATGAAGCACCCGCCTCCTCAGATCCTCATCAAAAACACACCT |
| | | GTACCTGCGGATCCTCCAACGGCCTTCAACAAGGACAAGCTGAACTCTTTCATCACCCAG |
| | | TATTCTACTGGCCAAGTCAGCGTGGAGATCGAGTGGGAGCTGCAGAAGGAAAACAGCAAG |
| | | CGCTGGAACCCGGAGATCCAGTACACTTCCAACTATTACAAGTCTAATAATGTTGAATTT |
| | | GCTGTTAATACTGAAGGTGTATATAGTGAACCCCGCCCCATTGGCACCAGATACCTGACT |
| | | CGTAATCTGTAA |
| TTD-003 | 3626 | ATGGCTGCCGATGGTTATCTTCCAGATTGGCTCGAGGACAACCTTAGTGAAGGAATTCGC |
| 7 mer peptide | | GAGTGGTGGGCTTTGAAACCTGGAGCCCCTCAACCCAAGGCAAATCAACAACATCAAGAC |
| underlined | | AACGCTCGAGGTCTTGTGCTTCCGGGTTACAAATACCTTGGACCCGGCAACGGACTCGAC |
| | | AAGGGGGAGCCGGTCAACGCAGCAGACGCGGCGGCCCTCGAGCACGACAAGGCCTACGAC |
| | | CAGCAGCTCAAGGCCGGAGACAACCCGTACCTCAAGTACAACCACGCCGACGCCGAGTTC |
| | | CAGGAGCGGCTCAAAGAAGATACGTCTTTTGGGGGCAACCTCGGGCGAGCAGTCTTCCAG |
| | | GCCAAAAAGAGGCTTCTTGAACCTCTTGGTCTGGTTGAGGAAGCGGCTAAGACGGCTCCT |
| | | GGAAAGAAGAGGCCTGTAGAGCAGTCTCCTCAGGAACCGGACTCCTCCGCGGGTATTGGC |
| | | AAATCGGGTGCACAGCCCGCTAAAAAGAGACTCAATTTCGGTCAGACTGGCGACACAGAG |
| | | TCAGTCCCAGACCCTCAACCAATCGGAGAACCTCCCGCAGCCCCCTCAGGTGTGGGATCT |
| | | CTTACAATGGCTTCAGGTGGTGGCGCACCAGTGGCAGACAATAACGAAGGTGCCGATGGA |
| | | GTGGGTAGTTCCTCGGGAAATTGGCATTGCGATTCCCAATGGCTGGGGGACAGAGTCATC |
| | | ACCACCAGCACCCGAACCTGGGCCCTGCCCACCTACAACAATCACCTCTACAAGCAAATC |
| | | TCCAACAGCACATCTGGAGGATCTTCAAATGACAACGCCTACTTCGGCTACAGCACCCCC |
| | | TGGGGGTATTTTGACTTCAACAGATTCCACTGCCACTTCTCACCACGTGACTGGCAGCGA |
| | | CTCATCAACAACAACTGGGGATTCCGGCCTAAGCGACTCAACTTCAAGCTCTTCAACATT |
| | | CAGGTCAAAGAGGTTACGGACAACAATGGAGTCAAGACCATCGCCAATAACCTTACCAGC |
| | | ACGGTCCAGGTCTTCACGGACTCAGACTATCAGCTCCCGTACGTGCTCGGGTCGGCTCAC |
| | | GAGGGCTGCCTCCCGCCGTTCCCAGCGGACGTTTTCATGATTCCTCAGTACGGGTATCTG |
| | | ACGCTTAATGATGGAAGCCAGGCCGTGGGTCGTTCGTCCTTTTACTGCCTGGAATATTTC |
| | | CCGTCGCAAATGCTAAGAACGGGTAACAACTTCCAGTTCAGCTACGAGTTTGAGAACGTA |
| | | CCTTTCCATAGCAGCTACGCTCACAGCCAAAGCCTGGACCGACTAATGAATCCACTCATC |
| | | GACCAATACTTGTACTATCTCTCAAAGACTATTAACGGTTCTGGACAGAATCAACAAACG |
| | | CTAAAATTCAGTGTGGCCGGACCCAGCAACATGGCTGTCCAGGGAAGAAACTACATACCT |
| | | GGACCCAGCTACCGACAACAACGTGTCTCAACCACTGTGACTCAAAACAACAACAGCGAA |
| | | TTTGCTTGGCCTGGAGCTTCTTCTTGGGCTCTCAATGGACGTAATAGCTTGATGAATCCT |
| | | GGACCTGCTATGGCCAGCCACAAAGAAGGAGAGGACCGTTTCTTTCCTTTGTCTGGATCT |
| | | TTAATTTTTGGCAAACAAGGAACTGGAAGAGACAACGTGGATGCGGACAAAGTCATGATA |
| | | ACCAACGAAGAAGAAATTAAAACTACTAACCCGGTAGCAACGGAGTCCTATGGACAAGTG |
| | | GCCACAAACCACCAGAGTGCACAGGCTTATTCTACGGATGTGAGGATGCAGGCGCAGACC |
| | | GGCTGGGTTCAAAACCAAGGAATACTTCCGGGTATGGTTTGGCAGGACAGAGATGTGTAC |
| | | CTGCAAGGACCCATTTGGGCCAAAATTCCTCACACGGACGGCAACTTTCACCCTTCTCCG |
| | | CTGATGGGAGGGTTTGGAATGAAGCACCCGCCTCCTCAGATCCTCATCAAAAACACACCT |
| | | GTACCTGCCGATCCTCCAACGGCCTTCAACAAGGACAAGCTGAACTCTTTCATCACCCAG |
| | | TATTCTACTGGCCAAGTCAGCGTGGAGATCGAGTGGGAGCTGCAGAAGGAAAACAGCAAG |
| | | CGGTGGAACCCGGAGATCCAGTACACTTCCAACTATTACAAGTCTAATAATGTTGAATTT |
| | | GCTGTTAATACTGAAGGTGTATATAGTGAACCCCGCCCCATTGGCACCAGATACCTGACT |
| | | CGTAATCTGTAA |
| TTD-004 | 3627 | ATGGCTGCCGATGGTTATCTTCCAGATTGGCTCGAGGACAACCTTAGTGAAGGAATTCGC |
| 7 mer peptide | | GAGTGGTGGGCTTTGAAACCTGGAGCCCCTCAACCCAAGGCAAATCAACAACATCAAGAC |
| underlined | | AACGCTCGAGGTCTTGTGCTTCCGGGTTACAAATACCTTGGACCCGGCAACGGACTCGAC |
| | | AAGGGGGAGCCGGTCAACGCAGCAGACGCGGCGGCCCTCGAGCACGACAAGGCCTACGAC |
| | | CAGCAGCTCAAGGCCGGAGACAACCCGTACCTCAAGTACAACCACGCCGACGCCGAGTTC |
| | | CAGGAGCGGCTCAAAGAAGATACGTCTTTTGGGGGCAACCTCGGGCGAGCAGTCTTCCAG |
| | | GCCAAAAAGAGGCTTCTTGAACCTCTTGGTCTGGTTGAGGAAGCGGCTAAGACGGCTCCT |
| | | GGAAAGAAGAGGCCTGTAGAGCAGTCTCCTCAGGAACCGGACTCCTCCGCGGGTATTGGC |
| | | AAATCGGGTGCACAGCCCGCTAAAAAGAGACTCAATTTCGGTCAGACTGGCGACACAGAG |
| | | TCAGTCCCAGACCCTCAACCAATCGGAGAACCTCCCGCAGCCCCCTCAGGTGTGGGATCT |
| | | CTTACAATGGCTTCAGGTGGTGGCGCACCAGTGGCAGACAATAACGAAGGTGCCGATGGA |
| | | GTGGGTAGTTCCTCGGGAAATTGGCATTGCGATTCCCAATGGCTGGGGGACAGAGTCATC |
| | | ACCACCAGCACCCGAACCTGGGCCCTGCCCACCTACAACAATCACCTCTACAAGCAAATC |
| | | TCCAACAGCACATCTGGAGGATCTTCAAATGACAACGCCTACTICGGCTACAGCACCCCC |
| | | TGGGGGTATTTTGACTTCAACAGATTCCACTGCCACTTCTCACCACGTGACTGGCAGCGA |
| | | CTCATCAACAACAACTGGGGATTCCGGCCTAAGCGACTCAACTTCAAGCTCTTCAACATT |
| | | CAGGTCAAAGAGGTTACGGACAACAATGGAGTCAAGACCATCGCCAATAACCTTACCAGC |
| | | ACGGTCCAGGTCTTCACGGACTCAGACTATCAGCTCCCGTACGTGCTCGGGTCGGCTCAC |
| | | GAGGGCTGCCTCCCGCCGTTCCCAGCGGACGTTTTCATGATTCCTCAGTACGGGTATCTG |
| | | ACGCTTAATGATGGAAGCCAGGCCGTGGGTCGTTCGTCCTTTTACTGCCTGGAATATTTC |
| | | CCGTCGCAAATGCTAAGAACGGGTAACAACTTCCAGTTCAGCTACGAGTTTGAGAACGTA |
| | | CCTTTCCATAGCAGCTACGCTCACAGCCAAAGCCTGGACCGACTAATGAATCCACTCATC |
| | | GACCAATACTTGTACTATCTCTCAAAGACTATTAACGGTTCTGGACAGAATCAACAAACG |
| | | CTAAAATTCAGTGTGGCCGGACCCAGCAACATGGCTGTCCAGGGAAGAAACTACATACCT |
| | | GGACCCAGCTACCGACAACAACGTGTCTCAACCACTGTGACTCAAAACAACAACAGCGAA |
| | | TTTGCTTGGCCTGGAGCTTCTTCTTGGGCTCTCAATGGACGTAATAGCTTGATGAATCCT |
| | | GGACCTGCTATGGCCAGCCACAAAGAAGGAGAGGACCGTTTCTTTCCTTTGTCTGGATCT |
| | | TTAATTTTTGGCAAACAAGGAACTGGAAGAGACAACGTGGATGCGGACAAAGTCATGATA |
| | | ACCAACGAAGAAGAAATTAAAACTACTAACCCGGTAGCAACGGAGTCCTATGGACAAGTG |
| | | GCCACAAACCACCAGAGTGCACAGATTGTTATGAATTCGTTGAAGGCTCAGGCGCAGACC |
| | | GGCTGGGTTCAAAACCAAGGAATACTTCCGGGTATGGTTTGGCAGGACAGAGATGTGTAC |
| | | CTGCAAGGACCCATTTGGGCCAAAATTCCTCACACGGACGGCAACTTTCACCCTTCTCCG |
| | | CTGATGGGAGGGTTTGGAATGAAGCACCCGCCTCCTCAGATCCTCATCAAAAACACACCT |
| | | GTACCTGCCGATCCTCCAACGGCCTTCAACAAGGACAAGCTGAACTCTTTCATCACCCAG |
| | | TATTCTACTGGCCAAGTCAGCGTGGAGATCGAGTGGGAGCTGCAGAAGGAAAACAGCAAG |
| | | CGGTGGAACCCGGAGATCCAGTACACTTCCAACTATTACAAGTCTAATAATGTTGAATTT |
| | | GCTGTTAATACTGAAGGTGTATATAGTGAACCCCGCCCCATTGGCACCAGATACCTGACT |
| | | CGTAATCTGTAA |
| TTD-005 | 3628 | ATGGCTGCCGATGGTTATCTTCCAGATTGGCTCGAGGACAACCTTAGTGAAGGAATTCGC |
| 7 mer peptide | | GAGTGGTGGGCTTTGAAACCTGGAGCCCCTCAACCCAAGGCAAATCAACAACATCAAGAC |
| underlined | | AACGCTCGAGGTCTTGTGCTTCCGGGTTACAAATACCTTGGACCCGGCAACGGACTCGAC |
| | | AAGGGGGAGCCGGTCAACGCAGCAGACGCGGCGGCCCTCGAGCACGACAAGGCCTACGAC |
| | | CAGCAGCTCAAGGCCGGAGACAACCCGTACCTCAAGTACAACCACGCCGACGCCGAGTTC |
| | | CAGGAGCGGCTCAAAGAAGATACGTCTTTTGGGGGCAACCTCGGGCGAGCAGTCTTCCAG |
| | | GCCAAAAAGAGGCTTCTTGAACCTCTTGGTCTGGTTGAGGAAGCGGCTAAGACGGCTCCT |
| | | GGAAAGAAGAGGCCTGTAGAGCAGTCTCCTCAGGAACCGGACTCCTCCGCGGGTATTGGC |
| | | AAATCGGGTGCACAGCCCGCTAAAAAGAGACTCAATTTCGGTCAGACTGGCGACACAGAG |
| | | TCAGTCCCAGACCCTCAACCAATCGGAGAACCTCCCGCAGCCCCCTCAGGTGTGGGATCT |
| | | CTTACAATGGCTTCAGGTGGTGGCGCACCAGTGGCAGACAATAACGAAGGTGCCGATGGA |
| | | GTGGGTAGTTCCTCGGGAAATTGGCATTGCGATTCCCAATGGCTGGGGGACAGAGTCATC |
| | | ACCACCAGCACCCGAACCTGGGCCCTGCCCACCTACAACAATCACCTCTACAAGCAAATC |
| | | TCCAACAGCACATCTGGAGGATCTTCAAATGACAACGCCTACTTCGGCTACAGCACCCCC |
| | | TGGGGGTATTTTGACTTCAACAGATTCCACTGCCACTTCTCACCACGTGACTGGCAGCGA |
| | | CTCATCAACAACAACTGGGGATTCCGGCCTAAGCGACTCAACTTCAAGCTCTTCAACATT |
| | | CAGGTCAAAGAGGTTACGGACAACAATGGAGTCAAGACCATCGCCAATAACCTTACCAGC |
| | | ACGGTCCAGGTCTTCACGGACTCAGACTATCAGCTCCCGTACGTGCTCGGGTCGGCTCAC |
| | | GAGGGCTGCCTCCCGCCGTTCCCAGCGGACGTTTTCATGATTCCTCAGTACGGGTATCTG |
| | | ACGCTTAATGATGGAAGCCAGGCCGTGGGTCGTTCGTCCTTTTACTGCCTGGAATATTTC |
| | | CCGTCGCAAATGCTAAGAACGGGTAACAACTTCCAGTTCAGCTACGAGTTTGAGAACGTA |
| | | CCTTTCCATAGCAGCTACGCTCACAGCCAAAGCCTGGACCGACTAATGAATCCACTCATC |
| | | GACCAATACTTGTACTATCTCTCAAAGACTATTAACGGTTCTGGACAGAATCAACAAACG |
| | | CTAAAATTCAGTGTGGCCGGACCCAGCAACATGGCTGTCCAGGGAAGAAACTACATACCT |
| | | GGACCCAGCTACCGACAACAACGTGTCTCAACCACTGTGACTCAAAACAACAACAGCGAA |
| | | TTTGCTTGGCCTGGAGCTTCTTCTTGGGCTCTCAATGGACGTAATAGCTTGATGAATCCT |
| | | GGACCTGCTATGGCCAGCCACAAAGAAGGAGAGGACCGTTTCTTTCCTTTGTCTGGATCT |
| | | TTAATTTTTGGCAAACAAGGAACTGGAAGAGACAACGTGGATGCGGACAAAGTCATGATA |
| | | ACCAACGAAGAAGAAATTAAAACTACTAACCCGGTAGCAACGGAGTCCTATGGACAAGTG |
| | | GCCACAAACCACCAGAGTGCACAGGCTCGGGAGAGTCCTCGTGGGCTGCAGGCGCAGACC |
| | | GGCTGGGTTCAAAACCAAGGAATACTTCCGGGTATGGTTTGGCAGGACAGAGATGTGTAC |
| | | CTGCAAGGACCCATTTGGGCCAAAATTCCTCACACGGACGGCAACTTTCACCCTTCTCCG |
| | | CTGATGGGAGGGTTTGGAATGAAGCACCCGCCTCCTCAGATCCTCATCAAAAACACACCT |
| | | GTACCTGCCGATCCTCCAACGGCCTTCAACAAGGACAAGCTGAACTCTTTCATCACCCAG |
| | | TATTCTACTGGCCAAGTCAGCGTGGAGATCGAGTGGGAGCTGCAGAAGGAAAACAGCAAG |
| | | CGGTGGAACCCGGAGATCCAGTACACTTCCAACTATTACAAGTCTAATAATGTTGAATTT |
| | | GCTGTTAATACTGAAGGTGTATATAGTGAACCCCGCCCCATTGGCACCAGATACCTGACT |
| | | CGTAATCTGTAA |
| TTD-006 | 3629 | ATGGCTGCCGATGGTTATCTTCCAGATTGGCTCGAGGACAACCTTAGTGAAGGAATTCGC |
| 7 mer peptide | | GAGTGGTGGGCTTTGAAACCTGGAGCCCCTCAACCCAAGGCAAATCAACAACATCAAGAC |
| underlined | | AACGCTCGAGGTCTTGTGCTTCCGGGTTACAAATACCTTGGACCCGGCAACGGACTCGAC |
| | | AAGGGGGAGCCGGTCAACGCAGCAGACGCGGCGGCCCTCGAGCACGACAAGGCCTACGAC |
| | | CAGCAGCTCAAGGCCGGAGACAACCCGTACCTCAAGTACAACCACGCCGACGCCGAGTTC |
| | | CAGGAGCGGCTCAAAGAAGATACGTCTTTTGGGGGCAACCTCGGGCGAGCAGTCTTCCAG |
| | | GCCAAAAAGAGGCTTCTTGAACCTCTTGGTCTGGTTGAGGAAGCGGCTAAGACGGCTCCT |
| | | GGAAAGAAGAGGCCTGTAGAGCAGTCTCCTCAGGAACCGGACTCCTCCGCGGGTATTGGC |
| | | AAATCGGGTGCACAGCCCGCTAAAAAGAGACTCAATTTCGGTCAGACTGGCGACACAGAG |
| | | TCAGTCCCAGACCCTCAACCAATCGGAGAACCTCCCGCAGCCCCCTCAGGTGTGGGATCT |
| | | CTTACAATGGCTTCAGGTGGTGGCGCACCAGTGGCAGACAATAACGAAGGTGCCGATGGA |
| | | GTGGGTAGTTCCTCGGGAAATTGGCATTGCGATTCCCAATGGCTGGGGGACAGAGTCATC |
| | | ACCACCAGCACCCGAACCTGGGCCCTGCCCACCTACAACAATCACCTCTACAAGCAAATC |
| | | TCCAACAGCACATCTGGAGGATCTTCAAATGACAACGCCTACTTCGGCTACAGCACCCCC |
| | | TGGGGGTATTTTGACTTCAACAGATTCCACTGCCACTTCTCACCACGTGACTGGCAGCGA |
| | | CTCATCAACAACAACTGGGGATTCCGGCCTAAGCGACTCAACTTCAAGCTCTTCAACATT |
| | | CAGGTCAAAGAGGTTACGGACAACAATGGAGTCAAGACCATCGCCAATAACCTTACCAGC |
| | | ACGGTCCAGGTCTTCACGGACTCAGACTATCAGCTCCCGTACGTGCTCGGGTCGGCTCAC |
| | | GAGGGCTGCCTCCCGCCGTTCCCAGCGGACGTTTTCATGATTCCTCAGTACGGGTATCTG |
| | | ACGCTTAATGATGGAAGCCAGGCCGTGGGTCGTTCGTCCTTTTACTGCCTGGAATATTTC |
| | | CCGTCGCAAATGCTAAGAACGGGTAACAACTTCCAGTTCAGCTACGAGTTTGAGAACGTA |
| | | CCTTTCCATAGCAGCTACGCTCACAGCCAAAGCCTGGACCGACTAATGAATCCACTCATC |
| | | GACCAATACTTGTACTATCTCTCAAAGACTATTAACGGTTCTGGACAGAATCAACAAACG |
| | | CTAAAATTCAGTGTGGCCGGACCCAGCAACATGGCTGTCCAGGGAAGAAACTACATACCT |
| | | GGACCCAGCTACCGACAACAACGTGTCTCAACCACTGTGACTCAAAACAACAACAGCGAA |
| | | TTTGCTTGGCCTGGAGCTTCTTCTTGGGCTCTCAATGGACGTAATAGCTTGATGAATCCT |
| | | GGACCTGCTATGGCCAGCCACAAAGAAGGAGAGGACCGTTTCTTTCCTTTGTCTGGATCT |
| | | TTAATTTTTGGCAAACAAGGAACTGGAAGAGACAACGTGGATGCGGACAAAGTCATGATA |
| | | ACCAACGAAGAAGAAATTAAAACTACTAACCCGGTAGCAACGGAGTCCTATGGACAAGTG |
| | | GCCACAAACCACCAGAGTGCACAGGCTAGTTTTAATGATACTAGGGCTCAGGCGCAGACC |
| | | GGCTGGGTTCAAAACCAAGGAATACTTCCGGGTATGGTTTGGCAGGACAGAGATGTGTAC |
| | | CTGCAAGGACCCATTTGGGCCAAAATTCCTCACACGGACGGCAACTTTCACCCTTCTCCG |
| | | CTGATGGGAGGGTTTGGAATGAAGCACCCGCCTCCTCAGATCCTCATCAAAAACACACCT |
| | | GTACCTGCCGATCCTCCAACGGCCTTCAACAAGGACAAGCTGAACTCTTTCATCACCCAG |
| | | TATTCTACTGGCCAAGTCAGCGTGGAGATCGAGTGGGAGCTGCAGAAGGAAAACAGCAAG |
| | | CGGTGGAACCCGGAGATCCAGTACACTTCCAACTATTACAAGTCTAATAATGTTGAATTT |
| | | GCTGTTAATACTGAAGGTGTATATAGTGAACCCCGCCCCATTGGCACCAGATACCTGACT |
| | | CGTAATCTGTAA |
| TTD-007 | 3630 | ATGGCTGCCGATGGTTATCTTCCAGATTGGCTCGAGGACAACCTTAGTGAAGGAATTCGC |
| 9 mer peptide | | GAGTGGTGGGCTTTGAAACCTGGAGCCCCTCAACCCAAGGCAAATCAACAACATCAAGAC |
| underlined | | AACGCTCGAGGTCTTGTGCTTCCGGGTTACAAATACCTTGGACCCGGCAACGGACTCGAC |
| | | AAGGGGGAGCCGGTCAACGCAGCAGACGCGGCGGCCCTCGAGCACGACAAGGCCTACGAC |
| | | CAGCAGCTCAAGGCCGGAGACAACCCGTACCTCAAGTACAACCACGCCGACGCCGAGTTC |
| | | CAGGAGCGGCTCAAAGAAGATACGTCTTTTGGGGGCAACCTCGGGCGAGCAGTCTTCCAG |
| | | GCCAAAAAGAGGCTTCTTGAACCTCTTGGTCTGGTTGAGGAAGCGGCTAAGACGGCTCCT |
| | | GGAAAGAAGAGGCCTGTAGAGCAGTCTCCTCAGGAACCGGACTCCTCCGCGGGTATTGGC |
| | | AAATCGGGTGCACAGCCCGCTAAAAAGAGACTCAATTTCGGTCAGACTGGCGACACAGAG |
| | | TCAGTCCCAGACCCTCAACCAATCGGAGAACCTCCCGCAGCCCCCTCAGGTGTGGGATCT |
| | | CTTACAATGGCTTCAGGTGGTGGCGCACCAGTGGCAGACAATAACGAAGGTGCCGATGGA |
| | | GTGGGTAGTTCCTCGGGAAATTGGCATTGCGATTCCCAATGGCTGGGGGACAGAGTCATC |
| | | ACCACCAGCACCCGAACCTGGGCCCTGCCCACCTACAACAATCACCTCTACAAGCAAATC |
| | | TCCAACAGCACATCTGGAGGATCTTCAAATGACAACGCCTACTTCGGCTACAGCACCCCC |
| | | TGGGGGTATTTTGACTTCAACAGATTCCACTGCCACTTCTCACCACGTGACTGGCAGCGA |
| | | CTCATCAACAACAACTGGGGATTCCGGCCTAAGCGACTCAACTTCAAGCTCTTCAACATT |
| | | CAGGTCAAAGAGGTTACGGACAACAATGGAGTCAAGACCATCGCCAATAACCTTACCAGC |
| | | ACGGTCCAGGTCTTCACGGACTCAGACTATCAGCTCCCGTACGTGCTCGGGTCGGCTCAC |
| | | GAGGGCTGCCTCCCGCCGTTCCCAGCGGACGTTTTCATGATTCCTCAGTACGGGTATCTG |
| | | ACGCTTAATGATGGAAGCCAGGCCGTGGGTCGTTCGTCCTTTTACTGCCTGGAATATTTC |
| | | CCGTCGCAAATGCTAAGAACGGGTAACAACTTCCAGTTCAGCTACGAGTTTGAGAACGTA |
| | | CCTTTCCATAGCAGCTACGCTCACAGCCAAAGCCTGGACCGACTAATGAATCCACTCATC |
| | | GACCAATACTTGTACTATCTCTCAAAGACTATTAACGGTTCTGGACAGAATCAACAAACG |
| | | CTAAAATTCAGTGTGGCCGGACCCAGCAACATGGCTGTCCAGGGAAGAAACTACATACCT |
| | | GGACCCAGCTACCGACAACAACGTGTCTCAACCACTGTGACTCAAAACAACAACAGCGAA |
| | | TTTGCTTGGCCTGGAGCTTCTTCTTGGGCTCTCAATGGACGTAATAGCTTGATGAATCCT |
| | | GGACCTGCTATGGCCAGCCACAAAGAAGGAGAGGACCGTTTCTTTCCTTTGTCTGGATCT |
| | | TTAATTTTTGGCAAACAAGGAACTGGAAGAGACAACGTGGATGCGGACAAAGTCATGATA |
| | | ACCAACGAAGAAGAAATTAAAACTACTAACCCGGTAGCAACGGAGTCCTATGGACAAGTG |
| | | GCCACAAACCACCAGAGTGGTGGTACGTTGGCCGTCGTGTCGCTTGCTCAGGCGCAGACC |
| | | GGCTGGGTTCAAAACCAAGGAATACTTCCGGGTATGGTTTGGCAGGACAGAGATGTGTAC |
| | | CTGCAAGGACCCATTTGGGCCAAAATTCCTCACACGGACGGCAACTTTCACCCTTCTCCG |
| | | CTGATGGGAGGGTTTGGAATGAAGCACCCGCCTCCTCAGATCCTCATCAAAAACACACCT |
| | | GTACCTGCCGATCCTCCAACGGCCTTCAACAAGGACAAGCTGAACTCTTTCATCACCCAG |
| | | TATTCTACTGGCCAAGTCAGCGTGGAGATCGAGTGGGAGCTGCAGAAGGAAAACAGCAAG |
| | | CGGTGGAACCCGGAGATCCAGTACACTTCCAACTATTACAAGTCTAATAATGTTGAATTT |
| | | GCTGTTAATACTGAAGGTGTATATAGTGAACCCCGCCCCATTGGCACCAGATACCTGACT |
| | | CGTAATCTGTAA |
| TTD-008 | 3631 | ATGGCTGCCGATGGTTATCTTCCAGATTGGCTCGAGGACAACCTTAGTGAAGGAATTCGC |
| 7 mer peptide | | GAGTGGTGGGCTTTGAAACCTGGAGCCCCTCAACCCAAGGCAAATCAACAACATCAAGAC |
| underlined | | AACGCTCGAGGTCTTGTGCTTCCGGGTTACAAATACCTTGGACCCGGCAACGGACTCGAC |
| | | AAGGGGGAGCCGGTCAACGCAGCAGACGCGGCGGCCCTCGAGCACGACAAGGCCTACGAC |
| | | CAGCAGCTCAAGGCCGGAGACAACCCGTACCTCAAGTACAACCACGCCGACGCCGAGTTC |
| | | CAGGAGCGGCTCAAAGAAGATACGTCTTTTGGGGGCAACCTCGGGCGAGCAGTCTTCCAG |
| | | GCCAAAAAGAGGCTTCTTGAACCTCTTGGTCTGGTTGAGGAAGCGGCTAAGACGGCTCCT |
| | | GGAAAGAAGAGGCCTGTAGAGCAGTCTCCTCAGGAACCGGACTCCTCCGCGGGTATTGGC |
| | | AAATCGGGTGCACAGCCCGCTAAAAAGAGACTCAATTTCGGTCAGACTGGCGACACAGAG |
| | | TCAGTCCCAGACCCTCAACCAATCGGAGAACCTCCCGCAGCCCCCTCAGGTGTGGGATCT |
| | | CTTACAATGGCTTCAGGTGGTGGCGCACCAGTGGCAGACAATAACGAAGGTGCCGATGGA |
| | | GTGGGTAGTTCCTCGGGAAATTGGCATTGCGATTCCCAATGGCTGGGGGACAGAGTCATC |
| | | ACCACCAGCACCCGAACCTGGGCCCTGCCCACCTACAACAATCACCTCTACAAGCAAATC |
| | | TCCAACAGCACATCTGGAGGATCTTCAAATGACAACGCCTACTTCGGCTACAGCACCCCC |
| | | TGGGGGTATTTTGACTTCAACAGATTCCACTGCCACTTCTCACCACGTGACTGGCAGCGA |
| | | CTCATCAACAACAACTGGGGATTCCGGCCTAAGCGACTCAACTTCAAGCTCTTCAACATT |
| | | CAGGTCAAAGAGGTTACGGACAACAATGGAGTCAAGACCATCGCCAATAACCTTACCAGC |
| | | ACGGTCCAGGTCTTCACGGACTCAGACTATCAGCTCCCGTACGTGCTCGGGTCGGCTCAC |
| | | GAGGGCTGCCTCCCGCCGTTCCCAGCGGACGTTTTCATGATTCCTCAGTACGGGTATCTG |
| | | ACGCTTAATGATGGAAGCCAGGCCGTGGGTCGTTCGTCCTTTTACTGCCTGGAATATTTC |
| | | CCGTCGCAAATGCTAAGAACGGGTAACAACTTCCAGTTCAGCTACGAGTTTGAGAACGTA |
| | | CCTTTCCATAGCAGCTACGCTCACAGCCAAAGCCTGGACCGACTAATGAATCCACTCATC |
| | | GACCAATACTTGTACTATCTCTCAAAGACTATTAACGGTTCTGGACAGAATCAACAAACG |
| | | CTAAAATTCAGTGTGGCCGGACCCAGCAACATGGCTGTCCAGGGAAGAAACTACATACCT |
| | | GGACCCAGCTACCGACAACAACGTGTCTCAACCACTGTGACTCAAAACAACAACAGCGAA |
| | | TTTGCTTGGCCTGGAGCTTCTTCTTGGGCTCTCAATGGACGTAATAGCTTGATGAATCCT |
| | | GGACCTGCTATGGCCAGCCACAAAGAAGGAGAGGACCGTTTCTTTCCTTTGTCTGGATCT |
| | | TTAATTTTTGGCAAACAAGGAACTGGAAGAGACAACGTGGATGCGGACAAAGTCATGATA |
| | | ACCAACGAAGAAGAAATTAAAACTACTAACCCGGTAGCAACGGAGTCCTATGGACAAGTG |
| | | GCCACAAACCACCAGAGTGCACAGGCTTATGGGTTGCCGAAGGGTCCTCAGGCGCAGACC |
| | | GGCTGGGTTCAAAACCAAGGAATACTTCCGGGTATGGTTTGGCAGGACAGAGATGTGTAC |
| | | CTGCAAGGACCCATTTGGGCCAAAATTCCTCACACGGACGGCAACTTTCACCCTTCTCCG |
| | | CTGATGGGAGGGTTTGGAATGAAGCACCCGCCTCCTCAGATCCTCATCAAAAACACACCT |
| | | GTACCTGCCGATCCTCCAACGGCCTTCAACAAGGACAAGCTGAACTCTTTCATCACCCAG |
| | | TATTCTACTGGCCAAGTCAGCGTGGAGATCGAGTGGGAGCTGCAGAAGGAAAACAGCAAG |
| | | CGGTGGAACCCGGAGATCCAGTACACTTCCAACTATTACAAGTCTAATAATGTTGAATTT |
| | | GCTGTTAATACTGAAGGTGTATATAGTGAACCCCGCCCCATTGGCACCAGATACCTGACT |
| | | CGTAATCTGTAA |
| TTD-009 | 3632 | ATGGCTGCCGATGGTTATCTTCCAGATTGGCTCGAGGACAACCTTAGTGAAGGAATTCGC |
| 7 mer peptide | | GAGTGGTGGGCTTTGAAACCTGGAGCCCCTCAACCCAAGGCAAATCAACAACATCAAGAC |
| underlined | | AACGCTCGAGGTCTTGTGCTTCCGGGTTACAAATACCTTGGACCCGGCAACGGACTCGAC |
| | | AAGGGGGAGCCGGTCAACGCAGCAGACGCGGCGGCCCTCGAGCACGACAAGGCCTACGAC |
| | | CAGCAGCTCAAGGCCGGAGACAACCCGTACCTCAAGTACAACCACGCCGACGCCGAGTTC |
| | | CAGGAGCGGCTCAAAGAAGATACGTCTTTTGGGGGCAACCTCGGGCGAGCAGTCTTCCAG |
| | | GCCAAAAAGAGGCTTCTTGAACCTCTTGGTCTGGTTGAGGAAGCGGCTAAGACGGCTCCT |
| | | GGAAAGAAGAGGCCTGTAGAGCAGTCTCCTCAGGAACCGGACTCCTCCGCGGGTATTGGC |
| | | AAATCGGGTGCACAGCCCGCTAAAAAGAGACTCAATTTCGGTCAGACTGGCGACACAGAG |
| | | TCAGTCCCAGACCCTCAACCAATCGGAGAACCTCCCGCAGCCCCCTCAGGTGTGGGATCT |
| | | CTTACAATGGCTTCAGGTGGTGGCGCACCAGTGGCAGACAATAACGAAGGTGCCGATGGA |
| | | GTGGGTAGTTCCTCGGGAAATTGGCATTGCGATTCCCAATGGCTGGGGGACAGAGTCATC |
| | | ACCACCAGCACCCGAACCTGGGCCCTGCCCACCTACAACAATCACCTCTACAAGCAAATC |
| | | TCCAACAGCACATCTGGAGGATCTTCAAATGACAACGCCTACTTCGGCTACAGCACCCCC |
| | | TGGGGGTATTTTGACTTCAACAGATTCCACTGCCACTTCTCACCACGTGACTGGCAGCGA |
| | | CTCATCAACAACAACTGGGGATTCCGGCCTAAGCGACTCAACTTCAAGCTCTTCAACATT |
| | | CAGGTCAAAGAGGTTACGGACAACAATGGAGTCAAGACCATCGCCAATAACCTTACCAGC |
| | | ACGGTCCAGGTCTTCACGGACTCAGACTATCAGCTCCCGTACGTGCTCGGGTCGGCTCAC |
| | | GAGGGCTGCCTCCCGCCGTTCCCAGCGGACGTTTTCATGATTCCTCAGTACGGGTATCTG |
| | | ACGCTTAATGATGGAAGCCAGGCCGTGGGTCGTTCGTCCTTTTACTGCCTGGAATATTTC |
| | | CCGTCGCAAATGCTAAGAACGGGTAACAACTTCCAGTTCAGCTACGAGTTTGAGAACGTA |
| | | CCTTTCCATAGCAGCTACGCTCACAGCCAAAGCCTGGACCGACTAATGAATCCACTCATC |
| | | GACCAATACTTGTACTATCTCTCAAAGACTATTAACGGTTCTGGACAGAATCAACAAACG |
| | | CTAAAATTCAGTGTGGCCGGACCCAGCAACATGGCTGTCCAGGGAAGAAACTACATACCT |
| | | GGACCCAGCTACCGACAACAACGTGTCTCAACCACTGTGACTCAAAACAACAACAGCGAA |
| | | TTTGCTTGGCCTGGAGCTTCTTCTTGGGCTCTCAATGGACGTAATAGCTTGATGAATCCT |
| | | GGACCTGCTATGGCCAGCCACAAAGAAGGAGAGGACCGTTTCTTTCCTTTGTCTGGATCT |
| | | TTAATTTTTGGCAAACAAGGAACTGGAAGAGACAACGTGGATGCGGACAAAGTCATGATA |
| | | ACCAACGAAGAAGAAATTAAAACTACTAACCCGGTAGCAACGGAGTCCTATGGACAAGTG |
| | | GCCACAAACCACCAGAGTGCACAGGCTTCGACTGGGACGCTTCGGCTTCAGGCGCAGACC |
| | | GGCTGGGTTCAAAACCAAGGAATACTTCCGGGTATGGTTTGGCAGGACAGAGATGTGTAC |
| | | CTGCAAGGACCCATTTGGGCCAAAATTCCTCACACGGACGGCAACTTTCACCCTTCTCCG |
| | | CTGATGGGAGGGTTTGGAATGAAGCACCCGCCTCCTCAGATCCTCATCAAAAACACACCT |
| | | GTACCTGCCGATCCTCCAACGGCCTTCAACAAGGACAAGCTGAACTCTTTCATCACCCAG |
| | | TATTCTACTGGCCAAGTCAGCGTGGAGATCGAGTGGGAGCTGCAGAAGGAAAACAGCAAG |
| | | CGGTGGAACCCGGAGATCCAGTACACTTCCAACTATTACAAGTCTAATAATGTTGAATTT |
| | | GCTGTTAATACTGAAGGTGTATATAGTGAACCCCGCCCCATTGGCACCAGATACCTGACT |
| | | CGTAATCTGTAA |
| TTD-010 | 3633 | ATGGCTGCCGATGGTTATCTTCCAGATTGGCTCGAGGACAACCTTAGTGAAGGAATTCGC |
| 7 mer peptide | | GAGTGGTGGGCTTTGAAACCTGGAGCCCCTCAACCCAAGGCAAATCAACAACATCAAGAC |
| underlined | | AACGCTCGAGGTCTTGTGCTTCCGGGTTACAAATACCTTGGACCCGGCAACGGACTCGAC |
| | | AAGGGGGAGCCGGTCAACGCAGCAGACGCGGCGGCCCTCGAGCACGACAAGGCCTACGAC |
| | | CAGCAGCTCAAGGCCGGAGACAACCCGTACCTCAAGTACAACCACGCCGACGCCGAGTTC |
| | | CAGGAGCGGCTCAAAGAAGATACGTCTTTTGGGGGCAACCTCGGGCGAGCAGTCTTCCAG |
| | | GCCAAAAAGAGGCTTCTTGAACCTCTTGGTCTGGTTGAGGAAGCGGCTAAGACGGCTCCT |
| | | GGAAAGAAGAGGCCTGTAGAGCAGTCTCCTCAGGAACCGGACTCCTCCGCGGGTATTGGC |
| | | AAATCGGGTGCACAGCCCGCTAAAAAGAGACTCAATTTCGGTCAGACTGGCGACACAGAG |
| | | TCAGTCCCAGACCCTCAACCAATCGGAGAACCTCCCGCAGCCCCCTCAGGTGTGGGATCT |
| | | CTTACAATGGCTTCAGGTGGTGGCGCACCAGTGGCAGACAATAACGAAGGTGCCGATGGA |
| | | GTGGGTAGTTCCTCGGGAAATTGGCATTGCGATTCCCAATGGCTGGGGGACAGAGTCATC |
| | | ACCACCAGCACCCGAACCTGGGCCCTGCCCACCTACAACAATCACCTCTACAAGCAAATC |
| | | TCCAACAGCACATCTGGAGGATCTTCAAATGACAACGCCTACTTCGGCTACAGCACCCCC |
| | | TGGGGGTATTTTGACTTCAACAGATTCCACTGCCACTTCTCACCACGTGACTGGCAGCGA |
| | | CTCATCAACAACAACTGGGGATTCCGGCCTAAGCGACTCAACTTCAAGCTCTTCAACATT |
| | | CAGGTCAAAGAGGTTACGGACAACAATGGAGTCAAGACCATCGCCAATAACCTTACCAGC |
| | | ACGGTCCAGGTCTTCACGGACTCAGACTATCAGCTCCCGTACGTGCTCGGGTCGGCTCAC |
| | | GAGGGCTGCCTCCCGCCGTTCCCAGCGGACGTTTTCATGATTCCTCAGTACGGGTATCTG |
| | | ACGCTTAATGATGGAAGCCAGGCCGTGGGTCGTTCGTCCTTTTACTGCCTGGAATATTTC |
| | | CCGTCGCAAATGCTAAGAACGGGTAACAACTTCCAGTTCAGCTACGAGITTGAGAACGTA |
| | | CCTTTCCATAGCAGCTACGCTCACAGCCAAAGCCTGGACCGACTAATGAATCCACTCATC |
| | | GACCAATACTTGTACTATCTCTCAAAGACTATTAACGGTTCTGGACAGAATCAACAAACG |
| | | CTAAAATTCAGTGTGGCCGGACCCAGCAACATGGCTGTCCAGGGAAGAAACTACATACCT |
| | | GGACCCAGCTACCGACAACAACGTGTCTCAACCACTGTGACTCAAAACAACAACAGCGAA |
| | | TTTGCTTGGCCTGGAGCTTCTTCTTGGGCTCTCAATGGACGTAATAGCTTGATGAATCCT |
| | | GGACCTGCTATGGCCAGCCACAAAGAAGGAGAGGACCGTTTCTTTCCTTTGTCTGGATCT |
| | | TTAATTTTTGGCAAACAAGGAACTGGAAGAGACAACGTGGATGCGGACAAAGTCATGATA |
| | | ACCAACGAAGAAGAAATTAAAACTACTAACCCGGTAGCAACGGAGTCCTATGGACAAGTG |
| | | GCCACAAACCACCAGAGTGCGCAGGCGTATTCGACGGATGAGAGGATGCAGGCGCAGACC |
| | | GGCTGGGTTCAAAACCAAGGAATACTTCCGGGTATGGTTTGGCAGGACAGAGATGTGTAC |
| | | CTGCAAGGACCCATTTGGGCCAAAATTCCTCACACGGACGGCAACTTTCACCCTTCTCCG |
| | | CTGATGGGAGGGTTTGGAATGAAGCACCCGCCTCCTCAGATCCTCATCAAAAACACACCT |
| | | GTACCTGCCGATCCTCCAACGGCCTTCAACAAGGACAAGCTGAACTCTTTCATCACCCAG |
| | | TATTCTACTGGCCAAGTCAGCGTGGAGATCGAGTGGGAGCTGCAGAAGGAAAACAGCAAG |
| | | CGGTGGAACCCGGAGATCCAGTACACTTCCAACTATTACAAGTCTAATAATGTTGAATTT |
| | | GCTGTTAATACTGAAGGTGTATATAGTGAACCCCGCCCCATTGGCACCAGATACCTGACT |
| | | CGTAATCTGTAA |
| TTD-011 | 3634 | ATGGCTGCCGATGGTTATCTTCCAGATTGGCTCGAGGACAACCTTAGTGAAGGAATTCGC |
| 7 mer peptide | | GAGTGGTGGGCTTTGAAACCTGGAGCCCCTCAACCCAAGGCAAATCAACAACATCAAGAC |
| underlined | | AACGCTCGAGGTCTTGTGCTTCCGGGTTACAAATACCTTGGACCCGGCAACGGACTCGAC |
| | | AAGGGGGAGCCGGTCAACGCAGCAGACGCGGCGGCCCTCGAGCACGACAAGGCCTACGAC |
| | | CAGCAGCTCAAGGCCGGAGACAACCCGTACCTCAAGTACAACCACGCCGACGCCGAGTTC |
| | | CAGGAGCGGCTCAAAGAAGATACGTCTTTTGGGGGCAACCTCGGGCGAGCAGTCTTCCAG |
| | | GCCAAAAAGAGGCTTCTTGAACCTCTTGGTCTGGTTGAGGAAGCGGCTAAGACGGCTCCT |
| | | GGAAAGAAGAGGCCTGTAGAGCAGTCTCCTCAGGAACCGGACTCCTCCGCGGGTATTGGC |
| | | AAATCGGGTGCACAGCCCGCTAAAAAGAGACTCAATTTCGGTCAGACTGGCGACACAGAG |
| | | TCAGTCCCAGACCCTCAACCAATCGGAGAACCTCCCGCAGCCCCCTCAGGTGTGGGATCT |
| | | CTTACAATGGCTTCAGGTGGTGGCGCACCAGTGGCAGACAATAACGAAGGTGCCGATGGA |
| | | GTGGGTAGTTCCTCGGGAAATTGGCATTGCGATTCCCAATGGCTGGGGGACAGAGTCATC |
| | | ACCACCAGCACCCGAACCTGGGCCCTGCCCACCTACAACAATCACCTCTACAAGCAAATC |
| | | TCCAACAGCACATCTGGAGGATCTTCAAATGACAACGCCTACTTCGGCTACAGCACCCCC |
| | | TGGGGGTATTTTGACTTCAACAGATTCCACTGCCACTTCTCACCACGTGACTGGCAGCGA |
| | | CTCATCAACAACAACTGGGGATTCCGGCCTAAGCGACTCAACTTCAAGCTCTTCAACATT |
| | | CAGGTCAAAGAGGTTACGGACAACAATGGAGTCAAGACCATCGCCAATAACCTTACCAGC |
| | | ACGGTCCAGGTCTTCACGGACTCAGACTATCAGCTCCCGTACGTGCTCGGGTCGGCTCAC |
| | | GAGGGCTGCCTCCCGCCGTTCCCAGCGGACGTTTTCATGATTCCTCAGTACGGGTATCTG |
| | | ACGCTTAATGATGGAAGCCAGGCCGTGGGTCGTTCGTCCTTTTACTGCCTGGAATATTTC |
| | | CCGTCGCAAATGCTAAGAACGGGTAACAACTTCCAGTTCAGCTACGAGTTTGAGAACGTA |
| | | CCTTTCCATAGCAGCTACGCTCACAGCCAAAGCCTGGACCGACTAATGAATCCACTCATC |
| | | GACCAATACTTGTACTATCTCTCAAAGACTATTAACGGTTCTGGACAGAATCAACAAACG |
| | | CTAAAATTCAGTGTGGCCGGACCCAGCAACATGGCTGTCCAGGGAAGAAACTACATACCT |
| | | GGACCCAGCTACCGACAACAACGTGTCTCAACCACTGTGACTCAAAACAACAACAGCGAA |
| | | TTTGCTTGGCCTGGAGCTTCTTCTTGGGCTCTCAATGGACGTAATAGCTTGATGAATCCT |
| | | GGACCTGCTATGGCCAGCCACAAAGAAGGAGAGGACCGTTTCTTTCCTTTGTCTGGATCT |
| | | TTAATTTTTGGCAAACAAGGAACTGGAAGAGACAACGTGGATGCGGACAAAGTCATGATA |
| | | ACCAACGAAGAAGAAATTAAAACTACTAACCCGGTAGCAACGGAGTCCTATGGACAAGTG |
| | | GCCACAAACCACCAGAGTGCGCAGGCGTATTCGACGGATGAGAGGAAGCAGGCGCAGACC |
| | | GGCTGGGTTCAAAACCAAGGAATACTTCCGGGTATGGTTTGGCAGGACAGAGATGTGTAC |
| | | CTGCAAGGACCCATTTGGGCCAAAATTCCTCACACGGACGGCAACTTTCACCCTTCTCCG |
| | | CTGATGGGAGGGTTTGGAATGAAGCACCCGCCTCCTCAGATCCTCATCAAAAACACACCT |
| | | GTACCTGCCGATCCTCCAACGGCCTTCAACAAGGACAAGCTGAACTCTTTCATCACCCAG |
| | | TATTCTACTGGCCAAGTCAGCGTGGAGATCGAGTGGGAGCTGCAGAAGGAAAACAGCAAG |
| | | CGGTGGAACCCGGAGATCCAGTACACTTCCAACTATTACAAGTCTAATAATGTTGAATTT |
| | | GCTGTTAATACTGAAGGTGTATATAGTGAACCCCGCCCCATTGGCACCAGATACCTGACT |
| | | CGTAATCTGTAA |
| TTD-012 | 3635 | ATGGCTGCCGATGGTTATCTTCCAGATTGGCTCGAGGACAACCTTAGTGAAGGAATTCGC |
| 7 mer peptide | | GAGTGGTGGGCTTTGAAACCTGGAGCCCCTCAACCCAAGGCAAATCAACAACATCAAGAC |
| underlined | | AACGCTCGAGGTCTTGTGCTTCCGGGTTACAAATACCTTGGACCCGGCAACGGACTCGAC |
| | | AAGGGGGAGCCGGTCAACGCAGCAGACGCGGCGGCCCTCGAGCACGACAAGGCCTACGAC |
| | | CAGCAGCTCAAGGCCGGAGACAACCCGTACCTCAAGTACAACCACGCCGACGCCGAGTTC |
| | | CAGGAGCGGCTCAAAGAAGATACGTCTTTTGGGGGCAACCTCGGGCGAGCAGTCTTCCAG |
| | | GCCAAAAAGAGGCTTCTTGAACCTCTTGGTCTGGTTGAGGAAGCGGCTAAGACGGCTCCT |
| | | GGAAAGAAGAGGCCTGTAGAGCAGTCTCCTCAGGAACCGGACTCCTCCGCGGGTATTGGC |
| | | AAATCGGGTGCACAGCCCGCTAAAAAGAGACTCAATTTCGGTCAGACTGGCGACACAGAG |
| | | TCAGTCCCAGACCCTCAACCAATCGGAGAACCTCCCGCAGCCCCCTCAGGTGTGGGATCT |
| | | CTTACAATGGCTTCAGGTGGTGGCGCACCAGTGGCAGACAATAACGAAGGTGCCGATGGA |
| | | GTGGGTAGTTCCTCGGGAAATTGGCATTGCGATTCCCAATGGCTGGGGGACAGAGTCATC |
| | | ACCACCAGCACCCGAACCTGGGCCCTGCCCACCTACAACAATCACCTCTACAAGCAAATC |
| | | TCCAACAGCACATCTGGAGGATCTTCAAATGACAACGCCTACTTCGGCTACAGCACCCCC |
| | | TGGGGGTATTTTGACTTCAACAGATTCCACTGCCACTTCTCACCACGTGACTGGCAGCGA |
| | | CTCATCAACAACAACTGGGGATTCCGGCCTAAGCGACTCAACTTCAAGCTCTTCAACATT |
| | | CAGGTCAAAGAGGTTACGGACAACAATGGAGTCAAGACCATCGCCAATAACCTTACCAGC |
| | | ACGGTCCAGGTCTTCACGGACTCAGACTATCAGCTCCCGTACGTGCTCGGGTCGGCTCAC |
| | | GAGGGCTGCCTCCCGCCGTTCCCAGCGGACGTTTTCATGATTCCTCAGTACGGGTATCTG |
| | | ACGCTTAATGATGGAAGCCAGGCCGTGGGTCGTTCGTCCTTTTACTGCCTGGAATATTTC |
| | | CCGTCGCAAATGCTAAGAACGGGTAACAACTTCCAGTTCAGCTACGAGTTTGAGAACGTA |
| | | CCTTTCCATAGCAGCTACGCTCACAGCCAAAGCCTGGACCGACTAATGAATCCACTCATC |
| | | GACCAATACTTGTACTATCTCTCAAAGACTATTAACGGTTCTGGACAGAATCAACAAACG |
| | | CTAAAATTCAGTGTGGCCGGACCCAGCAACATGGCTGTCCAGGGAAGAAACTACATACCT |
| | | GGACCCAGCTACCGACAACAACGTGTCTCAACCACTGTGACTCAAAACAACAACAGCGAA |
| | | TTTGCTTGGCCTGGAGCTTCTTCTTGGGCTCTCAATGGACGTAATAGCTTGATGAATCCT |
| | | GGACCTGCTATGGCCAGCCACAAAGAAGGAGAGGACCGTTTCTTTCCTTTGTCTGGATCT |
| | | TTAATTTTTGGCAAACAAGGAACTGGAAGAGACAACGTGGATGCGGACAAAGTCATGATA |
| | | ACCAACGAAGAAGAAATTAAAACTACTAACCCGGTAGCAACGGAGTCCTATGGACAAGTG |
| | | GCCACAAACCACCAGAGTGCACAGGCTTATGTTTCGTCTGTTAAGATGCAGGCGCAGACC |
| | | GGCTGGGTTCAAAACCAAGGAATACTTCCGGGTATGGTTTGGCAGGACAGAGATGTGTAC |
| | | CTGCAAGGACCCATTTGGGCCAAAATTCCTCACACGGACGGCAACTTTCACCCTTCTCCG |
| | | CTGATGGGAGGGTTTGGAATGAAGCACCCGCCTCCTCAGATCCTCATCAAAAACACACCT |
| | | GTACCTGCCGATCCTCCAACGGCCTTCAACAAGGACAAGCTGAACTCTTTCATCACCCAG |
| | | TATTCTACTGGCCAAGTCAGCGTGGAGATCGAGTGGGAGCTGCAGAAGGAAAACAGCAAG |
| | | CGGTGGAACCCGGAGATCCAGTACACTTCCAACTATTACAAGTCTAATAATGTTGAATTT |
| | | GCTGTTAATACTGAAGGTGTATATAGTGAACCCCGCCCCATTGGCACCAGATACCTGACT |
| | | CGTAATCTGTAA |
| TTD-013 | 4 | ATGGCTGCCGATGGTTATCTTCCAGATTGGCTCGAGGACAACCTTAGTGAAGGAATTCGC |
| | | GAGTGGTGGGCTTTGAAACCTGGAGCCCCTCAACCCAAGGCAAATCAACAACATCAAGAC |
| | | AACGCTCGAGGTCTTGTGCTTCCGGGTTACAAATACCTTGGACCCGGCAACGGACTCGAC |
| | | AAGGGGGAGCCGGTCAACGCAGCAGACGCGGCGGCCCTCGAGCACGACAAGGCCTACGAC |
| | | CAGCAGCTCAAGGCCGGAGACAACCCGTACCTCAAGTACAACCACGCCGACGCCGAGTTC |
| | | CAGGAGCGGCTCAAAGAAGATACGTCTTTTGGGGGCAACCTCGGGCGAGCAGTCTTCCAG |
| | | GCCAAAAAGAGGCTTCTTGAACCTCTTGGTCTGGTTGAGGAAGCGGCTAAGACGGCTCCT |
| | | GGAAAGAAGAGGCCTGTAGAGCAGTCTCCTCAGGAACCGGACTCCTCCGCGGGTATTGGC |
| | | AAATCGGGTGCACAGCCCGCTAAAAAGAGACTCAATTTCGGTCAGACTGGCGACACAGAG |
| | | TCAGTCCCAGACCCTCAACCAATCGGAGAACCTCCCGCAGCCCCCTCAGGTGTGGGATCT |
| | | CTTACAATGGCTTCAGGTGGTGGCGCACCAGTGGCAGACAATAACGAAGGTGCCGATGGA |
| | | GTGGGTAGTTCCTCGGGAAATTGGCATTGCGATTCCCAATGGCTGGGGGACAGAGTCATC |
| | | ACCACCAGCACCCGAACCTGGGCCCTGCCCACCTACAACAATCACCTCTACAAGCAAATC |
| | | TCCAACAGCACATCTGGAGGATCTTCAAATGACAACGCCTACTTCGGCTACAGCACCCCC |
| | | TGGGGGTATTTTGACTTCAACAGATTCCACTGCCACTTCTCACCACGTGACTGGCAGCGA |
| | | CTCATCAACAACAACTGGGGATTCCGGCCTAAGCGACTCAACTTCAAGCTCTTCAACATT |
| | | CAGGTCAAAGAGGTTACGGACAACAATGGAGTCAAGACCATCGCCAATAACCTTACCAGC |
| | | ACGGTCCAGGTCTTCACGGACTCAGACTATCAGCTCCCGTACGTGCTCGGGTCGGCTCAC |
| | | GAGGGCTGCCTCCCGCCGTTCCCAGCGGACGTTTTCATGATTCCTCAGTACGGGTATCTG |
| | | ACGCTTAATGATGGAAGCCAGGCCGTGGGTCGTTCGTCCTTTTACTGCCTGGAATATTTC |
| | | CCGTCGCAAATGCTAAGAACGGGTAACAACTTCCAGTTCAGCTACGAGTTTGAGAACGTA |
| | | CCTTTCCATAGCAGCTACGCTCACAGCCAAAGCCTGGACCGACTAATGAATCCACTCATC |
| | | GACCAATACTTGTACTATCTCTCAAAGACTATTAACGGTTCTGGACAGAATCAACAAACG |
| | | CTAAAATTCAGTGTGGCCGGACCCAGCAACATGGCTGTCCAGGGAAGAAACTACATACCT |
| | | GGACCCAGCTACCGACAACAACGTGTCTCAACCACTGTGACTCAAAACAACAACAGCGAA |
| | | TTTGCTTGGCCTGGAGCTTCTTCTTGGGCTCTCAATGGACGTAATAGCTTGATGAATCCT |
| | | GGACCTGCTATGGCCAGCCACAAAGAAGGAGAGGACCGTTTCTTTCCTTTGTCTGGATCT |
| | | TTAATTTTTGGCAAACAAGGAACTGGAAGAGACAACGTGGATGCGGACAAAGTCATGATA |
| | | ACCAACGAAGAAGAAATTAAAACTACTAACCCGGTAGCAACGGAGTCCTATGGACAAGTG |
| | | GCCACAAACCACCAGAGTCCGCTTAATGGTGCCGTCCATCTTTATGCTCAGGCGCAGACC |
| | | GGCTGGGTTCCGAACCAAGGAATACTTCCGGGTATGGTTTGGCAGGACAGAGATGTGTAC |
| | | CTGCAAGGACCCATTTGGGCCAAAATTCCTCACACGGACGGCAACTTTCACCCTTCTCCG |
| | | CTGATGGGAGGGTTTGGAATGAAGCACCCGCCTCCTCAGATCCTCATCAAAAACACACCT |
| | | GTACCTGCCGATCCTCCAACGGCCTTCAACAAGGACAAGCTGAACTCTTTCATCACCCAG |
| | | TATTCTACTGGCCAAGTCAGCGTGGAGATCGAGTGGGAGCTGCAGAAGGAAAACAGCAAG |
| | | CGGTGGAACCCGGAGATCCAGTACACTTCCAACTATTACAAGTCTAATAATGTTGAATTT |
| | | GCTGTTAATACTGAAGGTGTATATAGTGAACCCCGCCCCATTGGCACCAGATACCTGACT |
| | | CGTAATCTGTAA |
| TTD-014 | 7 | ATGGCTGCCGATGGTTATCTTCCAGATTGGCTCGAGGACAACCTTAGTGAAGGAATTCGC |
| | | GAGTGGTGGGCTTTGAAACCTGGAGCCCCTCAACCCAAGGCAAATCAACAACATCAAGAC |
| | | AACGCTCGAGGTCTTGTGCTTCCGGGTTACAAATACCTTGGACCCGGCAACGGACTCGAC |
| | | AAGGGGGAGCCGGTCAACGCAGCAGACGCGGCGGCCCTCGAGCACGACAAGGCCTACGAC |
| | | CAGCAGCTCAAGGCCGGAGACAACCCGTACCTCAAGTACAACCACGCCGACGCCGAGTTC |
| | | CAGGAGCGGCTCAAAGAAGATACGTCTTTTGGGGGCAACCTCGGGCGAGCAGTCTTCCAG |
| | | GCCAAAAAGAGGCTTCTTGAACCTCTTGGTCTGGTTGAGGAAGCGGCTAAGACGGCTCCT |
| | | GGAAAGAAGAGGCCTGTAGAGCAGTCTCCTCAGGAACCGGACTCCTCCGCGGGTATTGGC |
| | | AAATCGGGTGCACAGCCCGCTAAAAAGAGACTCAATTTCGGTCAGACTGGCGACACAGAG |
| | | TCAGTCCCAGACCCTCAACCAATCGGAGAACCTCCCGCAGCCCCCTCAGGTGTGGGATCT |
| | | CTTACAATGGCTTCAGGTGGTGGCGCACCAGTGGCAGACAATAACGAAGGTGCCGATGGA |
| | | GTGGGTAGTTCCTCGGGAAATTGGCATTGCGATTCCCAATGGCTGGGGGACAGAGTCATC |
| | | ACCACCAGCACCCGAACCTGGGCCCTGCCCACCTACAACAATCACCTCTACAAGCAAATC |
| | | TCCAACAGCACATCTGGAGGATCTTCAAATGACAACGCCTACTTCGGCTACAGCACCCCC |
| | | TGGGGGTATTTTGACTTCAACAGATTCCACTGCCACTTCTCACCACGTGACTGGCAGCGA |
| | | CTCATCAACAACAACTGGGGATTCCGGCCTAAGCGACTCAACTTCAAGCTCTTCAACATT |
| | | CAGGTCAAAGAGGTTACGGACAACAATGGAGTCAAGACCATCGCCAATAACCTTACCAGC |
| | | ACGGTCCAGGTCTTCACGGACTCAGACTATCAGCTCCCGTACGTGCTCGGGTCGGCTCAC |
| | | GAGGGCTGCCTCCCGCCGTTCCCAGCGGACGTTTTCATGATTCCTCAGTACGGGTATCTG |
| | | ACGCTTAATGATGGAAGCCAGGCCGTGGGTCGTTCGTCCTTTTACTGCCTGGAATATTTC |
| | | CCGTCGCAAATGCTAAGAACGGGTAACAACTTCCAGTTCAGCTACGAGTTTGAGAACGTA |
| | | CCTTTCCATAGCAGCTACGCTCACAGCCAAAGCCTGGACCGACTAATGAATCCACTCATC |
| | | GACCAATACTTGTACTATCTCTCAAAGACTATTAACGGTTCTGGACAGAATCAACAAACG |
| | | CTAAAATTCAGTGTGGCCGGACCCAGCAACATGGCTGTCCAGGGAAGAAACTACATACCT |
| | | GGACCCAGCTACCGACAACAACGTGTCTCAACCACTGTGACTCAAAACAACAACAGCGAA |
| | | TTTGCTTGGCCTGGAGCTTCTTCTTGGGCTCTCAATGGACGTAATAGCTTGATGAATCCT |
| | | GGACCTGCTATGGCCAGCCACAAAGAAGGAGAGGACCGTTTCTTTCCTTTGTCTGGATCT |
| | | TTAATTTTTGGCAAACAAGGAACTGGAAGAGACAACGTGGATGCGGACAAAGTCATGATA |
| | | ACCAACGAAGAAGAAATTAAAACTACTAACCCGGTAGCAACGGAGTCCTATGGACAGGTC |
| | | GCTACGAATCATCAGTCTCCGCTGAATGGTGCGGTGCATCTGTATGCGCAGGCGCAGCTG |
| | | TCTCCGGTGAAGAATCAAGGAATACTTCCGGGTATGGTTTGGCAGGACAGAGATGTGTAC |
| | | CTGCAAGGACCCATTTGGGCCAAAATTCCTCACACGGACGGCAACTTTCACCCTTCTCCG |
| | | CTGATGGGAGGGTTTGGAATGAAGCACCCGCCTCCTCAGATCCTCATCAAAAACACACCT |
| | | GTACCTGCCGATCCTCCAACGGCCTTCAACAAGGACAAGCTGAACTCTTTCATCACCCAG |
| | | TATTCTACTGGCCAAGTCAGCGTGGAGATCGAGTGGGAGCTGCAGAAGGAAAACAGCAAG |
| | | CGGTGGAACCCGGAGATCCAGTACACTTCCAACTATTACAAGTCTAATAATGTTGAATTT |
| | | GCTGTTAATACTGAAGGTGTATATAGTGAACCCCGCCCCATTGGCACCAGATACCTGACT |
| | | CGTAATCTGTAA |

[1277] In some embodiments, an AAV capsid variant described herein comprises the amino acid sequence of any one of SEQ ID NOs: 5, 8, or 3636-3647, or an amino acid sequence with at least 80% (e.g., at least about 85, 90, 95, 96, 97, 98, or 99%) sequence identity thereto. In some embodiments, an AAV capsid variant described herein comprises the amino acid sequence of SEQ ID NO: 3636, or an amino acid sequence with at least 80% (e.g., at least about 85, 90, 95, 96, 97, 98, or 99%) sequence identity thereto. In some embodiments, an AAV capsid variant described herein comprises the amino acid sequence of SEQ ID NO: 5, or an amino acid sequence with at least 80% (e.g., at least about 85, 90, 95, 96, 97, 98, or 99%) sequence identity thereto. In some embodiments, an AAV capsid variant described herein comprises the amino acid sequence of SEQ ID NO: 8, or an amino acid sequence with at least 80% (e.g., at least about 85, 90, 95, 96, 97, 98, or 99%) sequence identity thereto. In some embodiments, an AAV capsid variant described herein comprises the amino acid sequence of SEQ ID NO: 3639, or an amino acid sequence with at least 80% (e.g., at least about 85, 90, 95, 96, 97, 98, or 99%) sequence identity thereto.

[1278] In some embodiments, the polynucleotide encoding an AAV capsid variant described herein comprises the nucleotide sequence of any one of SEQ ID NOs: 4, 7, or 3623-3635, or a nucleotide sequence with at least 80% (e.g., at least about 85, 90, 95, 96, 97, 98, or 99%) sequence identity thereto. In some embodiments, the polynucleotide encoding an AAV capsid variant described herein comprises the nucleotide sequence of SEQ ID NO: 3623, or a nucleotide sequence with at least 80% (e.g., at least about 85, 90, 95, 96, 97, 98, or 99%) sequence identity thereto. In some embodiments, the polynucleotide encoding an AAV capsid variant described herein comprises the nucleotide sequence of SEQ ID NO: 4, or a nucleotide sequence with at least 80% (e.g., at least about 85, 90, 95, 96, 97, 98, or 99%) sequence identity thereto. In some embodiments, the polynucleotide encoding an AAV capsid variant described herein comprises the nucleotide sequence of SEQ ID NO: 7, or a nucleotide sequence with at least 80% (e.g., at least about 85, 90, 95, 96, 97, 98, or 99%) sequence identity thereto. In some embodiments, the polynucleotide encoding an AAV capsid variant described herein comprises the nucleotide sequence of SEQ ID NO: 3627, or a nucleotide sequence with at least 80% (e.g., at least about 85, 90, 95, 96, 97, 98, or 99%) sequence identity thereto. In some embodiments, the nucleic acid sequence encoding an AAV capsid variant described herein is codon optimized.

[1279] In some embodiments, the AAV capsid variant comprises a VP2 protein comprising the amino acid sequence corresponding to positions 138-743, of any one of SEQ ID NOs: 5, 8, or 3636-3647, or a sequence with at least 80% (e.g., at least about 85, 90, 95, 96, 97, 98, or 99%) sequence identity thereto. In some embodiments, the AAV capsid comprises a VP3 protein comprising the amino acid sequence corresponding to positions 203-743, of any one of SEQ ID NOs: 5, 8, or 3636-3647, or a sequence with at least 80% (e.g., at least about 85, 90, 95, 96, 97, 98, or 99%) sequence identity thereto.

[1280] In some embodiments, an AAV capsid variant, described herein has an increased tropism for a CNS cell or tissue, e.g., a brain cell, brain tissue, spinal cord cell, or spinal cord tissue, relative to the tropism of a reference sequence comprising the amino acid sequence of SEQ ID NO: 138.

[1281] In some embodiments, an AAV capsid variant, described herein transduces a brain region, e.g., selected from dentate nucleus, cerebellar cortex, cerebral cortex, brain stem, hippocampus, thalamus and putamen. In some embodiments, the level of transduction of said brain region is at least 5, 10, 50, 100, 200, 500, 1,000, 2,000, 5,000, or 10,000-fold greater as compared to a reference sequence of SEQ ID NO: 138.

[1282] In some embodiments, an AAV capsid variant described herein is enriched at least about 5, 6, 7, 8, 9, or 10-fold, in the brain compared to a reference sequence of SEQ ID NO: 138. In some embodiments, an AAV capsid variant described herein is enriched at least about 20, 30, 40, or 50-fold in the brain compared to a reference sequence of SEQ ID NO: 138. In some embodiments, an AAV capsid variant described herein is enriched at least about 100, 200, 300, or 400-fold in the brain compared to a reference sequence of SEQ ID NO: 138.

[1283] In some embodiments, an AAV capsid variant described herein delivers an increased level of viral genomes to a brain region. In some embodiments, the level of viral genomes is increased by at least 5, 10, 20, 30, 40 or 50-fold, as compared to a reference sequence of SEQ ID NO: 138. In some embodiments, the brain region comprises a frontal cortex, sensory cortex, motor cortex, putamen, thalamus, cerebellar cortex, dentate nucleus, caudate, and/or hippocampus.

[1284] In some embodiments, an AAV capsid variant described herein delivers an increased level of a payload to a brain region. In some embodiments, the level of the payload is increased by at least 5, 10, 50, 100, 200, 500, 1,000, 2,000, 5,000, or 10,000-fold, as compared to a reference sequence of SEQ ID NO: 138. In some embodiments, the brain region comprises a frontal cortex, sensory cortex, motor cortex, putamen, thalamus, cerebellar cortex, dentate nucleus, caudate, and/or hippocampus.

[1285] In some embodiments, an AAV capsid variant described herein delivers an increased level of a payload to a spinal cord region. In some embodiments, the level of the payload is increased by at least 10, 20, 50, 100, 200, 300, 400, 500, 600, 700, 800 or 900-fold, as compared to a reference sequence of SEQ ID NO: 138. In some embodiments, the spinal cord region comprises a cervical, thoracic, and/or lumbar region.

[1286] In some embodiments, an AAV capsid variant described herein shows preferential transduction in a brain region relative to the transduction in the dorsal root ganglia (DRG).

[1287] In some embodiments, an AAV capsid variant described herein has an increased tropism for a muscle cell or tissue, e.g., a heart cell or tissue, relative to the tropism of a reference sequence comprising the amino acid sequence of SEQ ID NO: 138. In some embodiments, the AAV capsid variant delivers an increased level of a payload to a muscle region. In some embodiments, the payload is increased by at least 10, 15, 20, 30, or 40-fold, as compared to a reference sequence of SEQ ID NO: 138. In some embodiments, the muscle region comprises a heart muscle, quadriceps muscle, and/or a diaphragm muscle region. In some embodiments, the muscle region comprises a heart muscle region, e.g., a heart atrium muscle region or a heart ventricle muscle region.

[1288] In some embodiments, an AAV capsid variant of the present disclosure is isolated, e.g., recombinant. In some embodiments, a polynucleotide encoding an AAV capsid variant of the present disclosure is isolated, e.g., recombinant.

[1289] In some embodiments, an AAV capsid polypeptide, e.g., an AAV capsid variant, of the present disclosure has decreased tropism for the liver. In some embodiments, an AAV capsid variant comprises a modification, e.g., substitution (e.g., conservative substitution), insertion, or deletion, that results in reduced tropism (e.g., de-targeting) and/or activity in the liver. In some embodiments, the reduced tropism in the liver is compared to an otherwise similar capsid that does not comprise the modification, e.g., a wild-type capsid polypeptide. In some embodiments, an AAV capsid variant described comprises a modification, e.g., substitution (e.g., conservative substitution), insertion, or deletion, that results in one or more of the following properties: (1) reduced tropism in the liver; (2) de-targeted expression in the liver; (3) reduced activity in the liver; and/or (4) reduced binding to galactose. In some embodiments, the reduction in any one, or all of properties (1)-(3) is compared to an otherwise similar AAV capsid variant that does not comprise the modification. Exemplary modifications are provided in WO 2018/119330; Pulicherla et al. (2011) Mol. Ther. 19(6): 1070-1078; Adachi et al. (2014) Nature Communications 5(3075), DOI: 10.1038/ncomms4075; and Bell et al. (2012) J. Virol. 86(13): 7326-33; the contents of which are hereby incorporated by reference in their entirety. In some embodiments, the AAV capsid variant comprises a modification e.g., substitution (e.g., conservative substitution), insertion, or deletion, at position N470 (e.g., N470A), D271 (e.g., D271A), N272 (e.g., N272A), Y446 (e.g., Y446A), N498 (e.g., N498Y or N4981), W503 (e.g., W503R or W503A), L620 (e.g., L620F), or a combination thereof, relative to a reference sequence numbered according to SEQ ID NO: 138. In some embodiments, the AAV capsid variant comprises one, two, three, four, five or all of an amino acid other than N at position 470 (e.g., A), an amino acid other than D at position 271 (e.g., A), an amino acid other than N at position 272 (e.g., A), an amino acid other than Y at position 446 (e.g., A), and amino acid other than N at position 498/(e.g., Y or I), and amino acid other than W at position 503 (e.g., R or A), and amino acid other than L at position 620 (e.g., F), relative to a reference sequence numbered according to SEQ ID NO: 138. In some embodiments, the AAV capsid variant comprises a modification e.g., substitution (e.g., conservative substitution), insertion, or deletion, at position N470 (e.g., N470A), D271 (e.g., D271A), N272 (e.g., N273A), Y446 (e.g., Y446A), and W503 (e.g., W503R or W503A), relative to a reference sequence numbered according to SEQ ID NO: 138. In some embodiments, the AAV capsid variant comprises a modification e.g., substitution (e.g., conservative substitution), insertion, or deletion, at N498 (e.g., N498Y) and L620 (e.g., L620F).

[1290] In some embodiments, an AAV capsid variant comprised herein comprises a modification as described in Adachi et al. (2014) Nature Communications 5(3075), DOI: 10.1038/ncomms4075, the contents of which are hereby incorporated by reference in its entirety. Exemplary modifications that alter or do not alter tissue transduction in at least the brain, liver, heart, lung, and/or kidney can be found in Supplementary Data 2 showing the AAV Barcode-Seq data obtained with AAV9-AA-VBCLib of Adachi et al. (supra), the contents of which are hereby incorporated by reference in its entirety.

[1291] Also provided herein are polynucleotide sequences encoding any of the AAV capsid variants described above and AAV particles, vectors, and cells comprising the same.

### Viral Genome

[1292] In some embodiments, an AAV particle, e.g., an AAV particle for the vectorized delivery of an antibody or fragment thereof described herein (e.g., an anti-tau antibody), comprises a viral genome. In some embodiments, the viral genome comprises a nucleotide sequence encoding a transgene, wherein the transgene encodes a payload, e.g., an antibody or fragment thereof (e.g., an anti-tau antibody described herein). In some embodiments, the viral genome further comprises an inverted terminal repeat (ITR) region, a promoter, an enhancer, an intron region, an exon region, a nucleic acid encoding a transgene encoding a payload, a poly A signal region, or a combination thereof. In some embodiments, a viral genome comprises a 5′AAV ITR and/or a 3′ AAV ITR. In some embodiments, any or all components of the viral genomes can be modified or optimized to improve expression or targeting of the payload (e.g., an antibody or fragment thereof) encoded by the transgene.

### Viral Genome Component: Inverted Terminal Repeats (ITRs)

[1293] In some embodiments, the viral genome comprises an ITR region. In some embodiments, the viral genome comprises at least one ITR region and a nucleic acid encoding a transgene encoding a payload, e.g., an antibody or fragment thereof (e.g., an anti-tau antibody). In some embodiments, the viral genome comprises two ITRs. In some embodiments, the two ITRs flank the nucleic acid encoding the transgene at the 5′ and 3′ ends. In some embodiments, the ITR functions as an origin of replication comprising recognition sites for replication. In some embodiments, the ITRs comprise sequence regions which can be complementary and symmetrically arranged. In some embodiments, the ITR incorporated into a viral genome may be comprised of naturally occurring nucleotide sequences or recombinantly derived nucleotide sequences.

[1294] In some embodiments, the ITR may be of the same AAV serotype as the capsid, e.g., a capsid protein selected from any of the AAV serotypes listed in Table 1A, or a functional variant thereof. In some embodiments, the ITR may be of a different AAV serotype than the capsid protein. In some embodiments, the AAV particle comprises a viral genome comprising two ITRs wherein the two ITRs of the viral genome are of the same AAV serotype. In other embodiments, the two ITRs of a viral genome are of different AAV serotypes. In some embodiments both ITRs of the viral genome of the AAV particle are AAV2 ITRs or a functional variant thereof.

[1295] In some embodiments, the ITR may be about 100 to about 150 nucleotides in length. In some embodiments, the ITR comprises about 120-140 nucleotides in length, e.g., about 130 nucleotides in length. In some embodiments, the ITR comprises about 140-150 nucleotides in length, about 141 nucleotides in length. In some embodiments, the viral genome comprises an ITR region comprising the nucleotide sequence of any of the sequences provided in Table 7A or a nucleotide sequence with at least 70%, 75%, 80%, 85%, 90%, 95% or 99% sequence identity thereto. In some embodiments, the viral genome comprises two ITR regions comprising the nucleotide sequence of any of the sequences provided in Table 7A or a nucleotide sequence with at least 70%, 75%, 80%, 85%, 90%, 95% or 99% sequence identity thereto, wherein the first and second ITR comprise the same sequence or wherein the first and second ITR comprise different sequences.

TABLE 7A
Inverted Terminal Repeat (ITR) Sequence Regions

| SEQ ID | |
|---|---|
| NO | Sequence |
| 2076 | CTGCGCGCTCGCTCGCTCACTGAGGCCGCCCGGGCAAAGCC |
| | CGGGCGTCGGGCGACCTTTGGTCGCCCGGCCTCAGTGAGCG |
| | AGCGAGCGCGCAGAGAGGGAGTGGCCAACTCCATCACTAGG |
| | GGTTCCT |
| 2077 | CCTGCAGGCAGCTGCGCGCTCGCTCGCTCACTGAGGCCGCC |
| | CGGGCAAAGCCCGGGCGTCGGGCGACCTTTGGTCGCCCGGC |
| | CTCAGTGAGCGAGCGAGCGCGCAGAGAGGGAGTGGCCAACT |
| | CCATCACTAGGGGTTCCT |
| 2078 | AGGAACCCCTAGTGATGGAGTTGGCCACTCCCTCTCTGCGC |
| | GCTCGCTCGCTCACTGAGGCCGGGCGACCAAAGGTCGCCCG |
| | ACGCCCGGGCTTTGCCCGGGCGGCCTCAGTGAGCGAGCGAG |
| | CGCGCAG |
| 2079 | AGGAACCCCTAGTGATGGAGTTGGCCACTCCCTCTCTGCGC |
| | GCTCGCTCGCTCACTGAGGCCGGGCGACCAAAGGTCGCCCG |
| | ACGCCCGGGCTTTGCCCGGGCGGCCTCAGTGAGCGAGCGAG |
| | CGCGCAGCTGCCTGCAGG |

[1296] In some embodiment, the viral genome comprises an ITR provided in Table 7A or a functional variant thereof. In some embodiments, the ITR comprises the nucleotide sequence of any one of SEQ ID NOs: 2076-2079 as provided in Table 7A, or a sequence with at least 70%, 75%, 80%, 85%, 90%, 95% or 99% sequence identity thereto. In some embodiments, the ITR comprises the nucleotide sequence of SEQ ID NO: 2076 or a nucleotide sequence with at least 70%, 75%, 80%, 85%, 90%, 95% or 99% sequence identity thereto. In some embodiments, the ITR comprises the nucleotide sequence of SEQ ID NO: 2078 or a nucleotide sequence with at least 70%, 75%, 80%, 85%, 90%, 95% or 99% sequence identity thereto.

[1297] In some embodiments, the viral genome comprises an ITR, e.g., a 5′ ITR, comprising the nucleotide sequence of SEQ ID NO: 2076 or a sequence with at least with at least 70%, 75%, 80%, 85%, 90%, 95% or 99% sequence identity thereto; and an ITR, e.g., a 3′ ITR, comprising the nucleotide sequence of SEQ ID NO: 2078 or a nucleotide sequence at least 70%, 75%, 80%, 85%, 90%, 95% or 99% sequence identity thereto.

### Viral Genome Component: Promoters

[1298] In some embodiments, the viral genome comprises an element to enhance the transgene target specificity and/or expression (See e.g., Powell et al. Viral Expression Cassette Elements to Enhance Transgene Target Specificity and Expression in Gene Therapy, 2015; the contents of which are herein incorporated by reference in its entirety). In some embodiments, an element to enhance the transgene target specificity and/or expression comprises a promoter, an enhancer, e.g., a CMV enhancer, or both. In some embodiments, the viral genome comprises a promoter operably linked to a transgene encoded by a nucleic acid molecule encoding a payload, e.g., antibody or fragment thereof (e.g., an anti-tau antibody). In some embodiments, the viral genome comprises an enhancer, e.g., a CMV enhancer. In some embodiment, the viral genome comprises at least two promoters.

[1299] In some embodiments, the viral genome comprises a promoter that is species specific, inducible, tissue-specific, and/or cell cycle-specific (e.g., as described in Parr et al., Nat. Med. 3:1145-9 (1997); the contents of which are herein incorporated by reference in their entirety). In some embodiments, the viral genome comprises a promoter that is sufficient for expression, e.g., in a target cell, of a payload (e.g., an antibody or fragment thereof, e.g., an anti-tau antibody) encoded by a transgene.

[1300] In some embodiments, the promoter may be a naturally occurring promoter, or a non-naturally occurring promoter. In some embodiments, the promoter is from a naturally expressed protein. In some embodiments, the promoter is an engineered promoter. In some embodiments, the promoter comprises a viral promoter, plant promoter, and/or a mammalian promoter. In some embodiments, the promoter may be a human promoter. In some embodiments, the promoter may be truncated. In some embodiments, the promoter is not a cell specific promoter.

[1301] In some embodiments, the viral genome comprises a promoter that results in expression in one or more, e.g., multiple, cells and/or tissues, e.g., a ubiquitous promoter. In some embodiments, a promoter that results in expression in one or more tissues includes but is not limited to a human elongation factor 1α-subunit (EF1α) promoter, a cytomegalovirus (CMV) immediate-early enhancer and/or promoter, a chicken β-actin (CBA) promoter and its derivative CAG, a β glucuronidase (GUSB) promoter, or ubiquitin C (UBC) promoter. In some embodiments, a tissue-specific expression elements can be used to restrict expression to certain cell types such as, but not limited to, muscle specific promoters, B cell promoters, monocyte promoters, leukocyte promoters, macrophage promoters, pancreatic acinar cell promoters, endothelial cell promoters, lung tissue promoters, astrocyte promoters, or nervous system promoters which can be used to restrict expression to neurons, astrocytes, or oligodendrocytes. In some embodiments, the viral genome comprises a ubiquitous promoter as described in Yu et al. (Molecular Pain 2011, 7:63), Soderblom et al. (E. Neuro 2015), Gill et al., (Gene Therapy 2001, Vol. 8, 1539-1546), and Husain et al. (Gene Therapy 2009), each of which are incorporated by reference in their entirety. In some embodiments, the viral genome comprises a ubiquitous promoter chosen from CMV, CBA (including derivatives CAG, CB6, CBh, etc.), EF-1a, PGK, UBC, GUSB (hGBp), or UCOE (promoter of HNRPA2B1-CBX3).

[1302] In some embodiments, the viral genome comprises a muscle-specific promoter, e.g., a promoter that results in expression in a muscle cell. In some embodiments, a muscle-specific promoter includes but is not limited to a mammalian muscle creatine kinase (MCK) promoter, a mammalian desmin (DES) promoter, a mammalian troponin I (TNNI2) promoter, a synthetic C5-12 promoter, and a mammalian skeletal alpha-actin (ASKA) promoter (see, e.g. U.S. Patent Publication US20110212529, the contents of which are herein incorporated by reference in their entirety).

[1303] In some embodiments, the viral genome comprises a nervous system specific promoter, e.g., a promoter that results in expression of a payload in a neuron, an astrocyte, and/or an oligodendrocyte. In some embodiments, a nervous system specific promoter that results in expression in neurons includes but is not limited to a neuron-specific enolase (NSE) promoter, a platelet-derived growth factor (PDGF) promoter, a platelet-derived growth factor B-chain (PDGF-β) promoter, a synapsin (Syn) promoter, a methyl-CpG binding protein 2 (MeCP2) promoter, a Caa+/calmodulin-dependent protein kinase II (CaMKII) promoter, a metabotropic glutamate receptor 2 (mGluR2) promoter, a neurofilament light (NFL) or heavy (NFH) promoter, a β-globin minigene nβ2 promoter, a preproenkephalin (PPE) promoter, a enkephalin (Enk) promoter, and an excitatory amino acid transporter 2 (EAAT2) promoter. In some embodiments, a nervous system specific promoter that results in expression in astrocytes includes but is not limited to a glial fibrillary acidic protein (GFAP) promoter and an EAAT2 promoter. In some embodiments, a nervous system specific promoter that results in expression in oligodendrocytes includes but is not limited to a myelin basic protein (MBP) promoter. In some embodiments, the viral genome comprises a nervous system specific promoter as described in Husain et al. (Gene Therapy 2009), Passini and Wolfe (J. Virol. 2001, 12382-12392), Xu et al. (Gene Therapy 2001, 8, 1323-1332), Drews et al. (Mamm Genome (2007) 18:723-731), and Raymond et al. (Journal of Biological Chemistry (2004) 279(44) 46234-46241), each of which are incorporated by reference in their entirety.

[1304] In some embodiments, the viral genome comprises a liver promoter, e.g., a promoter that results in expression a liver cell. In some embodiments, the liver promoter is chosen from human α-1-antitrypsin (hAAT) or thyroxine binding globulin (TBG). In some embodiments, the viral genome comprises an RNA pol III promoter. In some embodiments, the RNA pol III promoter is chosen from U6 or H1. In some embodiments, the viral genome comprises an endothelial cell promoter, e.g., a promoter that results in expression in an endothelial cell. In some embodiments, the endothelial cell promoter is an intercellular adhesion molecule 2 (ICAM2) promoter.

[1305] In some embodiments, the viral genome comprises a promoter chosen from a CAG promoter, a CBA promoter (e.g., a minimal CBA promoter), a CB promoter, a CMV(IE) promoter and/or enhancer, a GFAP promoter, a synapsin promoter, an ICAM2 promoter, or a functional variant thereof. In some embodiments, the viral genome comprises a CAG promoter, a CMVie enhancer, and a minimal CBA promoter. In some embodiments, the viral genome comprises a CMV(IE) promoter and a CB promoter.

[1306] In some embodiments, the CAG promoter comprises the nucleotide sequence of SEQ ID NO: 2080 or nucleotide sequence with at least 70%, 75%, 80%, 85%, 90%, 95%, or 99% sequence identity thereto. In some embodiments, the CBA promoter (e.g., a minimal CBA promoter) comprises the nucleotide sequence of SEQ ID NO: 2082 or nucleotide sequence with at least 70%, 75%, 80%, 85%, 90%, 95%, or 99% sequence identity thereto. In some embodiments, the CB promoter comprises the nucleotide sequence of SEQ ID NO: 2083 or nucleotide sequence with at least 70%, 75%, 80%, 85%, 90%, 95%, or 99% sequence identity thereto. In some embodiments, the GFAP promoter comprises the nucleotide sequence of SEQ ID NO: 2085 or nucleotide sequence with at least 70%, 75%, 80%, 85%, 90%, 95%, or 99% sequence identity thereto. In some embodiments, the snyapsin promoter comprises the nucleotide sequence of SEQ ID NO: 2086 or nucleotide sequence with at least 70%, 75%, 80%, 85%, 90%, 95%, or 99% sequence identity thereto. In some embodiments, the CMV(IE) promoter comprises the nucleotide sequence of SEQ ID NO: 2239 or nucleotide sequence with at least 70%, 75%, 80%, 85%, 90%, 95%, or 99% sequence identity thereto. In some embodiments, the CMV(ie) enhancer comprises the nucleotide sequence of SEQ ID NO: 2081 or nucleotide sequence with at least 70%, 75%, 80%, 85%, 90%, 95%, or 99% sequence identity thereto.

[1307] In some embodiments, the viral genome comprises a promoter provided in Table 8A, or a functional variant thereof. In some embodiments, the promoter comprises the nucleotide sequence of any one of SEQ ID NOs: 2080-2089, or 2238-2239, or a sequence with at least 70%, 75%, 80%, 85%, 90%, 95% or 99% sequence identity thereto. In some embodiments, the promoter comprises the nucleotide sequence of SEQ ID NO: 2080 or a sequence with at least 70%, 75%, 80%, 85%, 90%, 95% or 99% sequence identity thereto. In some embodiments, the promoter comprises the nucleotide sequence of SEQ ID NO: 2081, or a sequence with at least 70%, 75%, 80%, 85%, 90%, 95% or 99% sequence identity thereto. In some embodiments, the promoter comprises the nucleotide sequence of SEQ ID NO: 2082, or a sequence with at least 70%, 75%, 80%, 85%, 90%, 95% or 99% sequence identity thereto. In some embodiments, the promoter comprises the nucleotide sequence of SEQ ID NO: 2083, or a sequence with at least 70%, 75%, 80%, 85%, 90%, 95% or 99% sequence identity thereto. In some embodiments, the promoter comprises the nucleotide sequence of SEQ ID NO: 2085, or a sequence with at least 70%, 75%, 80%, 85%, 90%, 95% or 99% sequence identity thereto. In some embodiments, the promoter comprises the nucleotide sequence of SEQ ID NO: 2086, or a sequence with at least 70%, 75%, 80%, 85%, 90%, 95% or 99% sequence identity thereto. In some embodiments, the promoter comprises the nucleotide sequence of SEQ ID NO: 2239, or a sequence with at least 70%, 75%, 80%, 85%, 90%, 95% or 99% sequence identity thereto. In some embodiments, the promoter comprises the nucleotide sequence of SEQ ID NO: 4599, or a sequence with at least 70%, 75%, 80%, 85%, 90%, 95% or 99% sequence identity thereto.

TABLE 8A
Promoter Sequence Regions

| | SEQ ID | |
|---|---|---|
| Name | NO | Sequence |
| CAG | 2080 | CTAGTTATTAATAGTAATCAATTACGGGGTCATTAGTTCATAGCCCATATATGGAG |
| Promoter | | TTCCGCGTTACATAACTTACGGTAAATGGCCCGCCTGGCTGACCGCCCAACGACCC |
| Variant 1 | | CCGCCCATTGACGTCAATAATGACGTATGTTCCCATAGTAACGCCAATAGGGACTT |
| | | TCCATTGACGTCAATGGGTGGAGTATTTACGGTAAACTGCCCACTTGGCAGTACAT |
| | | CAAGTGTATCATATGCCAAGTACGCCCCCTATTGACGTCAATGACGGTAAATGGCC |
| | | CGCCTGGCATTATGCCCAGTACATGACCTTATGGGACTTTCCTACTTGGCAGTACA |
| | | TCTACGTATTAGTCATCGCTATTACCATGGTCGAGGTGAGCCCCACGTTCTGCTTC |
| | | ACTCTCCCCATCTCCCCCCCCTCCCCACCCCCAATTTTGTATTTATTTATTTTTTA |
| | | ATTATTTTGTGCAGCGATGGGGGCGGGGGGGGGGGGGGGGCGCGCGCCAGGCGGGG |
| | | CGGGGCGGGGCGAGGGGCGGGGCGGGGCGAGGCGGAGAGGTGCGGCGGCAGCCAAT |
| | | CAGAGCGGCGCGCTCCGAAAGTTTCCTTTTATGGCGAGGCGGCGGCGGCGGCGGCC |
| | | CTATAAAAAGCGAAGCGCGCGGCGGGCGGGAGTCGCTGCGCGCTGCCTTCGCCCCG |
| | | TGCCCCGCTCCGCCGCCGCCTCGCGCCGCCCGCCCCGGCTCTGACTGACCGCGTTA |
| | | CTCCCACAGGTGAGCGGGCGGGACGGCCCTTCTCCTCCGGGCTGTAATTAGCGCTT |
| | | GGTTTAATGACGGCTTGTTTCTTTTCTGTGGCTGCGTGAAAGCCTTGAGGGGCTCC |
| | | GGGAGGGCCCTTTGTGCGGGGGGAGCGGCTCGGGGGGTGCGTGCGTGTGTGTGTGC |
| | | GTGGGGAGCGCCGCGTGCGGCTCCGCGCTGCCCGGCGGCTGTGAGCGCTGCGGGCG |
| | | CGGCGCGGGGCTTTGTGCGCTCCGCAGTGTGCGCGAGGGGAGCGCGGCCGGGGGCG |
| | | GTGCCCCGCGGTGCGGGGGGGGCTGCGAGGGGAACAAAGGCTGCGTGCGGGGTGTG |
| | | TGCGTGGGGGGGTGAGCAGGGGGTGTGGGCGCGTCGGTCGGGCTGCAACCCCCCCT |
| | | GCACCCCCCTCCCCGAGTTGCTGAGCACGGCCCGGCTTCGGGTGCGGGGCTCCGTA |
| | | CGGGGCGTGGCGCGGGGCTCGCCGTGCCGGGCGGGGGGTGGCGGCAGGTGGGGGTG |
| | | CCGGGCGGGGCGGGGCCGCCTCGGGCCGGGGAGGGCTCGGGGGAGGGGCGCGGCGG |
| | | CCCCCGGAGCGCCGGCGGCTGTCGAGGCGCGGCGAGCCGCAGCCATTGCCTTTTAT |
| | | GGTAATCGTGCGAGAGGGCGCAGGGACTTCCTTTGTCCCAAATCTGTGCGGAGCCG |
| | | AAATCTGGGAGGCGCCGCCGCACCCCCTCTAGCGGGCGCGGGGCGAAGCGGTGCGG |
| | | CGCCGGCAGGAAGGAAATGGGCGGGGAGGGCCTTCGTGCGTCGCCGCGCCGCCGTC |
| | | CCCTTCTCCCTCTCCAGCCTCGGGGCTGTCCGCGGGGGGACGGCTGCCTTCGGGGG |
| | | GGACGGGGCAGGGCGGGGTTCGGCTTCTGGCGTGTGACCGGCGGCTCTAGAGCCTC |
| | | TGCTAACCATGTTCATGCCTTCTTCTTTTTCCTACAGCTCCTGGGCAACGTGCTGG |
| | | TTATTGTGCTGTCTCATCATTTTGGCAAAGAATTC |
| CMVie | 2081 | TAGCCCATATATGGAGTTCCGCGTTACATAACTTACGGTAAATGGCCCGCCTGGCT |
| Promoter | | GACCGCCCAACGACCCCCGCCCATTGACGTCAATAATGACGTATGTTCCCATAGTA |
| Variant | | ACGCCAATAGGGACTTTCCATTGACGTCAATGGGTGGAGTATTTACGGTAAACTGC |
| | | CCACTTGGCAGTACATCAAGTGTATCATATGCCAAGTACGCCCCCTATTGACGTCA |
| | | ATGACGGTAAATGGCCCGCCTGGCATTATGCCCAGTACATGACCTTATGGGACTTT |
| | | CCTACTTGGCAGTACATCT |
| CBA | 2082 | CATGGTCGAGGTGAGCCCCACGTTCTGCTTCACTCTCCCCATCTCCCCCCCCTCCC |
| Promoter | | CACCCCCAATTTTGTATTTATTTATTTTTTAATTATTTTGTGCAGCGATGGGGGCG |
| Variant | | GGGGGGGGGGGGGGGCGCGCGCCAGGCGGGGCGGGGCGGGGCGAGGGGCGGGGCGG |
| | | GGCGAGGCGGAGAGGTGCGGCGGCAGCCAATCAGAGCGGCGCGCTCCGAAAGTTTC |
| | | CTTTTATGGCGAGGCGGCGGCGGCGGCGGCCCTATAAAAAGCGAAGCGCGCGGCGG |
| | | GCG |
| CB | 2083 | CCACGTTCTGCTTCACTCTCCCCATCTCCCCCCCCTCCCCACCCCCAATTTTGTAT |
| Promoter | | TTATTTATTTTTTAATTATTTTGTGCAGCGATGGGGGCGGGGGGGGGGGGCGCGCG |
| | | CCAGGCGGGGCGGGGCGGGGCGAGGGGCGGGGCGGGGCGAGGCGGAGAGGTGCGGC |
| | | GGCAGCCAATCAGAGCGGCGCGCTCCGAAAGTTTCCTTTTATGGCGAGGCGGCGGC |
| | | GGCGGCGGCCCTATAAAAAGCGAAGCGCGCGGCGGG |
| CBA | 2084 | CGACATTGATTATTGACTAGTTATTAATAGTAATCAATTACGGGGTCATTAGTTCA |
| Promoter | | TAGCCCATATATGGAGTTCCGCGTTACATAACTTACGGTAAATGGCCCGCCTGGCT |
| | | GACCGCCCAACGACCCCCGCCCATTGACGTCAATAATGACGTATGTTCCCATAGTA |
| | | ACGCCAATAGGGACTTTCCATTGACGTCAATGGGTGGAGTATTTACGGTAAACTGC |
| | | CCACTTGGCAGTACATCAAGTGTATCATATGCCAAGTACGCCCCCTATTGACGTCA |
| | | ATGACGGTAAATGGCCCGCCTGGCATTATGCCCAGTACATGACCTTATGGGACTTT |
| | | CCTACTTGGCAGTACATCTACGTATTAGTCATCGCTATTACCATGTCGAGGCCACG |
| | | TTCTGCTTCACTCTCCCCATCTCCCCCCCCTCCCCACCCCCAATTTTGTATTTATT |
| | | TATTTTTTAATTATTTTGTGCAGCGATGGGGGCGGGGGGGGGGGGCGCGCGCCAGG |
| | | CGGGGCGGGGCGGGGCGAGGGGCGGGGCGGGGCGAGGCGGAGAGGTGCGGCGGCAG |
| | | CCAATCAGAGCGGCGCGCTCCGAAAGTTTCCTTTTATGGCGAGGCGGCGGCGGCGG |
| | | CGGCCCTATAAAAAGCGAAGCGCGCGGCGGGCGGGAGC |
| GFAP | 2085 | GATCTAACATATCCTGGTGTGGAGTAGCGGACGCTGCTATGACAGAGGCTCGGGGG |
| Promoter | | CCTGAGCTGGCTCTGTGAGCTGGGGAGGAGGCAGACAGCCAGGCCTTGTCTGCAAG |
| | | CAGACCTGGCAGCATTGGGCTGGCCGCCCCCCAGGGCCTCCTCTTCATGCCCAGTG |
| | | AATGACTCACCTTGGCACAGACACAATGTTCGGGGTGGGCACAGTGCCTGCTTCCC |
| | | GCCGCACCCCAGCCCCCCTCAAATGCCTTCCGAGAAGCCCATTGAGCAGGGGGCTT |
| | | GCATTGCACCCCAGCCTGACAGCCTGGCATCTTGGGATAAAAGCAGCACAGCCCCC |
| | | TAGGGGCTGCCCTTGCTGTGTGGCGCCACCGGCGGTGGAGAACAAGGCTCTATTCA |
| | | GCCTGTGCCCAGGAAAGGGGATCAGGGGATGCCCAGGCATGGACAGTGGGTGGCAG |
| | | GGGGGGAGAGGAGGGCTGTCTGCTTCCCAGAAGTCCAAGGACACAAATGGGTGAGG |
| | | GGAGAGCTCTCCCCATAGCTGGGCTGCGGCCCAACCCCACCCCCTCAGGCTATGCC |
| | | AGGGGGTGTTGCCAGGGGCACCCGGGCATCGCCAGTCTAGCCCACTCCTTCATAAA |
| | | GCCCTCGCATCCCAGGAGCGAGCAGAGCCAGAGCAGGTTGGAGAGGAGACGCATCA |
| | | CCTCCGCTGCTCGCGGGGATCCTCTAG |
| Synuclein | 2086 | TAGTATCTGCAGAGGGCCCTGCGTATGAGTGCAAGTGGGTTTTAGGACCAGGATGA |
| Promoter | | GGCGGGGTGGGGGTGCCTACCTGACGACCGACCCCGACCCACTGGACAAGCACCCA |
| | | ACCCCCATTCCCCAAATTGCGCATCCCCTATCAGAGAGGGGGAGGGGAAACAGGAT |
| | | GCGGCGAGGCGCGTGCGCACTGCCAGCTTCAGCACCGCGGACAGTGCCTTCGCCCC |
| | | CGCCTGGCGGCGCGCGCCACCGCCGCCTCAGCACTGAAGGCGCGCTGACGTCACTC |
| | | GCCGGTCCCCCGCAAACTCCCCTTCCCGGCCACCTTGGTCGCGTCCGCGCCGCCGC |
| | | CGGCCCAGCCGGACCGCACCACGCGAGGCGCGAGATAGGGGGGCACGGGCGCGACC |
| | | ATCTGCGCTGCGGCGCCGGCGACTCAGCGCTGCCTCAGTCTGCGGTGGGCAGCGGA |
| | | GGAGTCGTGTCGTGCCTGAGAGCGCAGCTGTGCTCCTGGGCACCGCGCAGTCCGCC |
| | | CCCGCGGCTCCTGGCCAGACCACCCCTAGGACCCCCTGCCCCAAGTCGCAGCC |
| CMVie | 2087 | CTAGTCGACATTGATTATTGACTAGTTATTAATAGTAATCAATTACGGGGTCATTA |
| Promoter | | GTTCATAGCCCATATATGGAGTTCCGCGTTACATAACTTACGGTAAATGGCCCGCC |
| Variant 2 | | TGGCTGACCGCCCAACGACCCCCGCCCATTGACGTCAATAATGACGTATGTTCCCA |
| | | TAGTAACGCCAATAGGGACTTTCCATTGACGTCAATGGGTGGAGTATTTACGGTAA |
| | | ACTGCCCACTTGGCAGTACATCAAGTGTATCATATGCCAAGTACGCCCCCTATTGA |
| | | CGTCAATGACGGTAAATGGCCCGCCTGGCATTATGCCCAGTACATGACCTTATGGG |
| | | ACTTTCCTACTTGGCAGTACATCTACGTATTAGTCATCGCTATTAC |
| CAG | 2088 | CTAGTCGACATTGATTATTGACTAGTTATTAATAGTAATCAATTACGGGGTCATTA |
| Promoter | | GTTCATAGCCCATATATGGAGTTCCGCGTTACATAACTTACGGTAAATGGCCCGCC |
| Variant 2 | | TGGCTGACCGCCCAACGACCCCCGCCCATTGACGTCAATAATGACGTATGTTCCCA |
| | | TAGTAACGCCAATAGGGACTTTCCATTGACGTCAATGGGTGGAGTATTTACGGTAA |
| | | ACTGCCCACTTGGCAGTACATCAAGTGTATCATATGCCAAGTACGCCCCCTATTGA |
| | | CGTCAATGACGGTAAATGGCCCGCCTGGCATTATGCCCAGTACATGACCTTATGGG |
| | | ACTTTCCTACTTGGCAGTACATCTACGTATTAGTCATCGCTATTACCATGGTCGAG |
| | | GTGAGCCCCACGTTCTGCTTCACTCTCCCCATCTCCCCCCCCTCCCCACCCCCAAT |
| | | TTTGTATTTATTTATTTTTTAATTATTTTGTGCAGCGATGGGGGCGGGGGGGGGGG |
| | | GGGGGCGCGCGCCAGGCGGGGCGGGGCGGGGCGAGGGGCGGGGCGGGGCGAGGCGG |
| | | AGAGGTGCGGCGGCAGCCAATCAGAGCGGCGCGCTCCGAAAGTTTCCTTTTATGGC |
| | | GAGGCGGCGGCGGCGGCGGCCCTATAAAAAGCGAAGCGCGCGGCGGGCGGGAGTCG |
| | | CTGCGCGCTGCCTTCGCCCCGTGCCCCGCTCCGCCGCCGCCTCGCGCCGCCCGCCC |
| | | CGGCTCTGACTGACCGCGTTACTCCCACAGGTGAGCGGGCGGGACGGCCCTTCTCC |
| | | TCCGGGCTGTAATTAGCGCTTGGTTTAATGACGGCTTGTTTCTTTTCTGTGGCTGC |
| | | GTGAAAGCCTTGAGGGGCTCCGGGAGGGCCCTTTGTGCGGGGGGAGCGGCTCGGGG |
| | | GGTGCGTGCGTGTGTGTGTGCGTGGGGAGCGCCGCGTGCGGCTCCGCGCTGCCCGG |
| | | CGGCTGTGAGCGCTGCGGGCGCGGCGCGGGGCTTTGTGCGCTCCGCAGTGTGCGCG |
| | | AGGGGAGCGCGGCCGGGGGCGGTGCCCCGCGGTGCGGGGGGGGCTGCGAGGGGAAC |
| | | AAAGGCTGCGTGCGGGGTGTGTGCGTGGGGGGGTGAGCAGGGGGTGTGGGCGCGTC |
| | | GGTCGGGCTGCAACCCCCCCTGCACCCCCCTCCCCGAGTTGCTGAGCACGGCCCGG |
| | | CTTCGGGTGCGGGGCTCCGTACGGGGCGTGGCGCGGGGCTCGCCGTGCCGGGCGGG |
| | | GGGTGGCGGCAGGTGGGGGTGCCGGGCGGGGCGGGGCCGCCTCGGGCCGGGGAGGG |
| | | CTCGGGGGAGGGGCGCGGCGGCCCCCGGAGCGCCGGCGGCTGTCGAGGCGCGGCGA |
| | | GCCGCAGCCATTGCCTTTTATGGTAATCGTGCGAGAGGGCGCAGGGACTTCCTTTG |
| | | TCCCAAATCTGTGCGGAGCCGAAATCTGGGAGGCGCCGCCGCACCCCCTCTAGCGG |
| | | GCGCGGGGCGAAGCGGTGCGGCGCCGGCAGGAAGGAAATGGGCGGGGAGGGCCTTC |
| | | GTGCGTCGCCGCGCCGCCGTCCCCTTCTCCCTCTCCAGCCTCGGGGCTGTCCGCGG |
| | | GGGGACGGCTGCCTTCGGGGGGGACGGGGCAGGGCGGGGTTCGGCTTCTGGCGTGT |
| | | GACCGGCGGCTCTAGAGCCTCTGCTAACCATGTTCATGCCTTCTTCTTTTTCCTAC |
| | | AGCTCCTGGGCAACGTGCTGGTTATTGTGCTGTCTCATCATTTTGGCAAAGAATTC |
| CB6 | 2089 | CTAGTCGACATTGATTATTGACTAGTTATTAATAGTAATCAATTACGGGGTCATTA |
| Promoter | | GTTCATAGCCCATATATGGAGTTCCGCGTTACATAACTTACGGTAAATGGCCCGCC |
| | | TGGCTGACCGCCCAACGACCCCCGCCCATTGACGTCAATAATGACGTATGTTCCCA |
| | | TAGTAACGCCAATAGGGACTTTCCATTGACGTCAATGGGTGGAGTATTTACGGTAA |
| | | ACTGCCCACTTGGCAGTACATCAAGTGTATCATATGCCAAGTACGCCCCCTATTGA |
| | | CGTCAATGACGGTAAATGGCCCGCCTGGCATTATGCCCAGTACATGACCTTATGGG |
| | | ACTTTCCTACTTGGCAGTACATCTACGTA |
| CAG | 2238 | CTAGTTATTAATAGTAATCAATTACGGGGTCATTAGTTCATAGCCCATATATGGAG |
| Promoter | | TTCCGCGTTACATAACTTACGGTAAATGGCCCGCCTGGCTGACCGCCCAACGACCC |
| Variant 3 | | CCGCCCATTGACGTCAATAATGACGTATGTTCCCATAGTAACGCCAATAGGGACTT |
| | | TCCATTGACGTCAATGGGTGGAGTATTTACGGTAAACTGCCCACTTGGCAGTACAT |
| | | CAAGTGTATCATATGCCAAGTACGCCCCCTATTGACGTCAATGACGGTAAATGGCC |
| | | CGCCTGGCATTATGCCCAGTACATGACCTTATGGGACTTTCCTACTTGGCAGTACA |
| | | TCTACGTATTAGTCATCGCTATTACCATGGTCGAGGTGAGCCCCACGTTCTGCTTC |
| | | ACTCTCCCCATCTCCCCCCCCTCCCCACCCCCAATTTTGTATTTATTTATTTTTTA |
| | | ATTATTTTGTGCAGCGATGGGGGCGGGGGGGGGGGGGGGGCGCGCGCCAGGCGGGG |
| | | CGGGGCGGGGCGAGGGGCGGGGCGGGGCGAGGCGGAGAGGTGCGGCGGCAGCCAAT |
| | | CAGAGCGGCGCGCTCCGAAAGTTTCCTTTTATGGCGAGGCGGCGGCGGCGGCGGCC |
| | | CTATAAAAAGCGAAGCGCGCGGCGGGCGGGAGTCGCTGCGCGCTGCCTTCGCCCCG |
| | | TGCCCCGCTCCGCCGCCGCCTCGCGCCGCCCGCCCCGGCTCTGACTGACCGCGTTA |
| | | CTCCCACAGGTGAGCGGGCGGGACGGCCCTTCTCCTCCGGGCTGTAATTAGCGCTT |
| | | GGTTTAATGACGGCTTGTTTCTTTTCTGTGGCTGCGTGAAAGCCTTGAGGGGCTCC |
| | | GGGAGGGCCCTTTGTGCGGGGGGAGCGGCTCGGGGGGTGCGTGCGTGTGTGTGTGC |
| | | GTGGGGAGCGCCGCGTGCGGCTCCGCGCTGCCCGGCGGCTGTGAGCGCTGCGGGCG |
| | | CGGCGCGGGGCTTTGTGCGCTCCGCAGTGTGCGCGAGGGGAGCGCGGCCGGGGGCG |
| | | GTGCCCCGCGGTGCGGGGGGGGCTGCGAGGGGAACAAAGGCTGCGTGCGGGGTGTG |
| | | TGCGTGGGGGGGTGAGCAGGGGGTGTGGGCGCGTCGGTCGGGCTGCAACCCCCCCT |
| | | GCACCCCCCTCCCCGAGTTGCTGAGCACGGCCCGGCTTCGGGTGCGGGGCTCCGTA |
| | | CGGGGCGTGGCGCGGGGCTCGCCGTGCCGGGCGGGGGGTGGCGGCAGGTGGGGGTG |
| | | CCGGGCGGGGCGGGGCCGCCTCGGGCCGGGGAGGGCTCGGGGGAGGGGCGCGGCGG |
| | | CCCCCGGAGCGCCGGCGGCTGTCGAGGCGCGGCGAGCCGCAGCCATTGCCTTTTAT |
| | | GGTAATCGTGCGAGAGGGCGCAGGGACTTCCTTTGTCCCAAATCTGTGCGGAGCCG |
| | | AAATCTGGGAGGCGCCGCCGCACCCCCTCTAGCGGGCGCGGGGCGAAGCGGTGCGG |
| | | CGCCGGCAGGAAGGAAATGGGCGGGGAGGGCCTTCGTGCGTCGCCGCGCCGCCGTC |
| | | CCCTTCTCCCTCTCCAGCCTCGGGGCTGTCCGCGGGGGGACGGCTGCCTTCGGGGG |
| | | GGACGGGGCAGGGCGGGGTTCGGCTTCTGGCGTGTGACCGGCGGCTCTAGAGCCTC |
| | | TGCTAACCATGTTCATGCCTTCTTCTTTTTCCTACAGCTCCTGGGCAACGTGCTGG |
| | | TTATTGTGCTGTCTCATCATTTTGGCAAAGAATT |
| CMVie | 2239 | GACATTGATTATTGACTAGTTATTAATAGTAATCAATTACGGGGTCATTAGTTCAT |
| Promoter | | AGCCCATATATGGAGTTCCGCGTTACATAACTTACGGTAAATGGCCCGCCTGGCTG |
| Variant 3 | | ACCGCCCAACGACCCCCGCCCATTGACGTCAATAATGACGTATGTTCCCATAGTAA |
| | | CGCCAATAGGGACTTTCCATTGACGTCAATGGGTGGAGTATTTACGGTAAACTGCC |
| | | CACTTGGCAGTACATCAAGTGTATCATATGCCAAGTACGCCCCCTATTGACGTCAA |
| | | TGACGGTAAATGGCCCGCCTGGCATTATGCCCAGTACATGACCTTATGGGACTTTC |
| | | CTACTTGGCAGTACATCTACGTATTAGTCATCGCTATTACCATG |

### Viral Genome Component: Untranslated Regions (UTRs)

[1308] In some embodiments, the viral genome comprises an untranslated region (UTR). In some embodiments, a wild-type UTR of a gene are transcribed but not translated. In some embodiments, the 5′ UTR starts at the transcription start site and ends at the start codon and the 3′ UTR starts immediately following the stop codon and continues until the termination signal for transcription.

[1309] In some embodiments, a UTR comprises a feature found in abundantly expressed genes of specific target organs to enhance the stability and protein production. As a non-limiting example, a 5′ UTR from mRNA normally expressed in the liver (e.g., albumin, serum amyloid A, Apolipoprotein A/B/E, transferrin, alpha fetoprotein, erythropoietin, or Factor VIII) may be used in the viral genome of an AAV particle described herein to enhance expression in hepatic cell lines or liver.

[1310] In some embodiments, a viral genome comprises a 5′UTR, e.g., a wild-type (e.g., naturally occurring) 5′UTR or a recombinant (e.g., non-naturally occurring) 5′UTR. In some embodiments, a 5′ UTR comprises a feature which plays a role in translation initiation. In some embodiments, a UTR, e.g., a 5′ UTR, comprises a Kozak sequence. In some embodiments, a Kozak sequence is involved in the process by which the ribosome initiates translation of many genes. In some embodiments, a Kozak sequence has the consensus sequence of CCR(A/G)CCAUGG, where R is a purine (adenine or guanine) three bases upstream of the start codon (ATG), which is followed by another ‘G’. In some embodiments, a Kozak sequence comprises the nucleotide sequence of GAGGAGCCACC (SEQ ID NO: 4543) or a nucleotide sequence with at least 95-99% sequence identity thereto. In some embodiments, a Kozak sequence comprises the nucleotide sequence of GCCGCCACCATG (SEQ ID NO: 2114), or a nucleotide sequence with at least 95-99% sequence identity thereto. In some embodiments, a viral genome comprises a 5′UTR comprising a Kozak sequence. In some embodiments, a viral genome comprises a 5′UTR that does not comprise a Kozak sequence.

[1311] In some embodiments, the viral genome comprises a 3′UTR, e.g., a wild-type (e.g., naturally occurring) 3′UTR or a recombinant (e.g., non-naturally occurring) 3′UTR. In some embodiments, a 3′ UTR comprises an element that modulates, e.g., increases or decreases, stability of a nucleic acid. In some embodiments, a 3′ UTR comprises stretches of Adenosines and Uridines embedded therein, e.g., an AU rich signature. These AU rich signatures are generally prevalent in genes with high rates of turnover and are described, e.g., in Chen et al, 1995, the contents of which are herein incorporated by reference in its entirety. In some embodiments, an AR rich signature comprises an AU rich element (ARE). In some embodiments, a 3′UTR comprises an ARE chosen from a class I ARE (e.g., c-Myc and MyoD), a class II ARE (e.g., GM-CSF and TNF-a), a class III ARE (e.g., c-Jun and Myogenin), or combination thereto. In some embodiments, a class I ARE comprises several dispersed copies of an AUUUA motif within U-rich regions. In some embodiments, a class II ARE comprises two or more overlapping UUAUUUA(U/A)(U/A) nonamers. In some embodiments, a class III ARE comprises U rich regions and/or do not contain an AUUUA motif. In some embodiments, an ARE destabilizes the messenger.

[1312] In some embodiments, a 3′UTR comprises a binding site for a protein member of the ELAV family. In some embodiments, a 3′ UTR comprises a binding site for an HuR protein. In some embodiments, an HuR protein binds to an ARE of any one of classes I-III and/or increases the stability of mRNA. Without wishing to be bound by theory, it is believed in some embodiments, that a 3′UTR comprising an HuR specific binding sites will lead to HuR binding and, stabilization of a message in vivo.

[1313] In some embodiments, the 3′ UTR of the viral genome comprises an oligo(dT) sequence for templated addition of a poly-A tail.

[1314] In some embodiments, the viral genome comprises a miRNA seed, binding site and/or full sequence. Generally, microRNAs (or miRNA or miR) are 19-25 nucleotide noncoding RNAs that bind to the sites of nucleic acid targets and down-regulate gene expression either by reducing nucleic acid molecule stability or by inhibiting translation. In some embodiments, the microRNA sequence comprises a seed region, e.g., a sequence in the region of positions 2-8 of the mature microRNA, which sequence has perfect Watson-Crick complementarity to the miRNA target sequence of the nucleic acid. In some embodiments, the viral genome or viral genome may be engineered to include, alter or remove at least one miRNA binding site, sequence, or seed region.

[1315] In some embodiments, a UTR from any gene known in the art may be incorporated into the viral genome of an AAV particle described herein. These UTRs, or portions thereof, may be placed in the same orientation as in the gene from which they were selected, or they may be altered in orientation or location. In some embodiments, the UTR used in the viral genome of the AAV particle may be inverted, shortened, lengthened, made with one or more other 5′ UTRs or 3′ UTRs known in the art. In some embodiments, an altered UTR, comprises a UTR has been changed in some way in relation to a reference sequence. For example, a 3′ or 5′ UTR may be altered relative to a wild type or native UTR by the change in orientation or location as taught above or may be altered by the inclusion of additional nucleotides, deletion of nucleotides, swapping or transposition of nucleotides. In some embodiments, the viral genome comprises an artificial UTR, e.g., a UTR that is not a variant of a wild-type, e.g., a naturally occurring, UTR. In some embodiments, the viral genome comprises a UTR selected from a family of transcripts whose proteins share a common function, structure, feature or property.

### Viral Genome Component: miR Binding Site

[1316] Tissue- or cell-specific expression of the AAV viral particles of the invention can be enhanced by introducing tissue- or cell-specific regulatory sequences, e.g., promoters, enhancers, microRNA binding sites, e.g., a detargeting site. Without wishing to be bound by theory, it is believed that an encoded miR binding site can modulate, e.g., prevent, suppress, or otherwise inhibit, the expression of a gene of interest on the viral genome of the invention, based on the expression of the corresponding endogenous microRNA (miRNA) or a corresponding controlled exogenous miRNA in a tissue or cell, e.g., a non-targeting cell or tissue. In some embodiments, a miR binding site modulates, e.g., reduces, expression of the payload encoded by a viral genome of an AAV particle described herein in a cell or tissue where the corresponding mRNA is expressed.

[1317] In some embodiments, the viral genome of an AAV particle described herein comprises a nucleotide sequence encoding a microRNA binding site, e.g., a detargeting site. In some embodiments, the viral genome of an AAV particle described herein comprises a nucleotide sequence encoding a miR binding site, a microRNA binding site series (miR BSs), or a reverse complement thereof.

[1318] In some embodiments, the nucleotide sequence encoding the miR binding site series or the miR binding site is located in the 3′-UTR region of the viral genome (e.g., 3′ relative to the nucleotide sequence encoding a payload), e.g., before the polyA sequence, 5′-UTR region of the viral genome (e.g., 5′ relative to the nucleotide sequence encoding a payload), or both.

[1319] In some embodiments, the encoded miR binding site series comprise at least 1-5 copies, e.g., at least 1-3, 2-4, 3-5, 1, 2, 3, 4, 5 or more copies of a miR binding site (miR BS). In some embodiments, all copies are identical, e.g., comprise the same miR binding site. In some embodiments, the miR binding sites within the encoded miR binding site series are continuous and not separated by a spacer. In some embodiments, the miR binding sites within an encoded miR binding site series are separated by a spacer, e.g., a non-coding sequence. In some embodiments, the spacer is about 1 to 6 nucleotides or about 5 to 10 nucleotides, e.g., about 7-8 nucleotides, nucleotides in length. In some embodiments, the spacer coding sequence or reverse complement thereof comprises one or more of (i) GGAT; (ii) CACGTG; (iii) GCATGC, or a repeat of one or more of (i)-(iii). In some embodiments, the spacer comprises the nucleotide sequence of GATAGTTA, or a nucleotide sequence having at least one, two, or three modifications, but no more than four modifications of GATAGTTA.

[1320] In some embodiments, the encoded miR binding site series comprise at least 1-5 copies, e.g., at least 1-3, 2-4, 3-5, 1, 2, 3, 4, 5 or more copies of a miR binding site (miR BS). In some embodiments, at least 1, 2, 3, 4, 5, or all of the copies are different, e.g., comprise a different miR binding site. In some embodiments, the miR binding sites within the encoded miR binding site series are continuous and not separated by a spacer. In some embodiments, the miR binding sites within an encoded miR binding site series are separated by a spacer, e.g., a non-coding sequence. In some embodiments, the spacer is about 1 to 6 nucleotides or about 5 to 10 nucleotides, e.g., about 7-8 nucleotides, in length. In some embodiments, the spacer comprises one or more of (i) GGAT; (ii) CACGTG; (iii) GCATGC, or a repeat of one or more of (i)-(iii). In some embodiments, the spacer comprises the nucleotide sequence of GATAGTTA, or a nucleotide sequence having at least one, two, or three modifications, but no more than four modifications of GATAGTTA.

[1321] In some embodiments, the encoded miR binding site is substantially identical (e.g., at least 70%, 75%, 80%, 85%, 90%, 95%, 99% or 100% identical), to the miR in the host cell. In some embodiments, the encoded miR binding site comprises at least 1, 2, 3, 4, or 5 mismatches or no more than 6, 7, 8, 9, or 10 mismatches to a miR in the host cell. In some embodiments, the mismatched nucleotides are contiguous. In some embodiments, the mismatched nucleotides are non-contiguous. In some embodiments, the mismatched nucleotides occur outside the seed region-binding sequence of the miR binding site, such as at one or both ends of the miR binding site. In some embodiments, the miR binding site is 100% identical to the miR in the host cell.

[1322] In some embodiments, the nucleotide sequence encoding the miR binding site is substantially complimentary (e.g., at least 70%, 75%, 80%, 85%, 90%, 95%, 99% or 100% complimentary), to the miR in the host cell. In some embodiments, to complementary sequence of the nucleotide sequence encoding the miR binding site comprises at least 1, 2, 3, 4, or 5 mismatches or no more than 6, 7, 8, 9, or 10 mismatches to a miR in the host cell. In some embodiments, the mismatched nucleotides are contiguous. In some embodiments, the mismatched nucleotides are non-contiguous. In some embodiments, the mismatched nucleotides occur outside the seed region-binding sequence of the miR binding site, such as at one or both ends of the miR binding site. In some embodiments, the encoded miR binding site is 100% complimentary to the miR in the host cell.

[1323] In some embodiments, an encoded miR binding site or sequence region is at least about 10 to about 125 nucleotides in length, e.g., at least about 10 to 50 nucleotides, 10 to 100 nucleotides, 50 to 100 nucleotides, 50 to 125 nucleotides, or 100 to 125 nucleotides in length. In some embodiments, an encoded miR binding site or sequence region is at least about 7 to about 28 nucleotides in length, e.g., at least about 8-28 nucleotides, 7-28 nucleotides, 8-18 nucleotides, 12-28 nucleotides, 20-26 nucleotides, 22 nucleotides, 24 nucleotides, or 26 nucleotides in length, and optionally comprises at least one consecutive region (e.g., 7 or 8 nucleotides) complementary (e.g., fully or partially complementary) to the seed sequence of a miRNA (e.g., a miR122, a miR142, a miR183).

[1324] In some embodiments, the encoded miR binding site is complementary (e.g., fully or partially complementary) to a miR expressed in liver or hepatocytes, such as miR122. In some embodiments, the encoded miR binding site or encoded miR binding site series comprises a miR122 binding site sequence. In some embodiments, the encoded miR122 binding site comprises the nucleotide sequence of ACAAACACCATTGTCACACTCCA (SEQ ID NO: 4673), or a nucleotide sequence having at least 50%, 55%, 60%, 65%, 70%, 75%, 80%, 85%, 90%, at least 95%, at least 99%, or 100% sequence identity, or having at least one, two, three, four, five, six, or seven modifications but no more than ten modifications to SEQ ID NO: 4673, e.g., wherein the modification can result in a mismatch between the encoded miR binding site and the corresponding miRNA. In some embodiments, the viral genome comprises at least 2, 3, 4, or 5 copies of the encoded miR122 binding site, e.g., an encoded miR122 binding site series, optionally wherein the encoded miR122 binding site series comprises the nucleotide sequence of: ACAAACACCATTGTCACACTCCACACAAACACCATTGTCACACTCCACACAAACACCATTGTCACACT CCA (SEQ ID NO: 4674), or a nucleotide sequence having at least 50%, 55%, 60%, 65%, 70%, 75%, 80%, 85%, 90%, at least 95%, at least 99%, or 100% sequence identity, or having at least one, two, three, four, five, six, or seven modifications but no more than ten modifications to SEQ ID NO: 4674, e.g., wherein the modification can result in a mismatch between the encoded miR binding site and the corresponding miRNA. In some embodiments, at least two of the encoded miR122 binding sites are connected directly, e.g., without a spacer. In other embodiments, at least two of the encoded miR122 binding sites are separated by a spacer, e.g., 1, 2, 3, 4, 5, 6, 7, 8, 9, or 10 nucleotides in length, which is located between two or more consecutive encoded miR122 binding site sequences. In embodiments, the spacer is about 1 to 6 nucleotides or about 5 to 10 nucleotides, e.g., about 7-8, in length. In some embodiments, the spacer coding sequence or reverse complement thereof comprises one or more of (i) GGAT; (ii) CACGTG; (iii) GCATGC, or a repeat of one or more of (i)-(iii). In some embodiments, an encoded miR binding site series comprises at least 3-5 copies (e.g., 4 copies) of a miR122 binding site, with or without a spacer, wherein the spacer is about 1 to 6 nucleotides or about 5 to 10 nucleotides, e.g., about 7-8 nucleotides or about 8 nucleotides, in length. In some embodiments, the spacer comprises the nucleotide sequence of GATAGTTA, or a nucleotide sequence having at least one, two, or three modifications, but no more than four modifications of GATAGTTA.

[1325] In some embodiments, the encoded miR binding site is complementary (e.g., fully or partially complementary) to a miR expressed in the heart. In embodiments, the encoded miR binding site or encoded miR binding site series comprises a miR-1 binding site. In some embodiments, the encoded miR-1 binding site comprises the nucleotide sequence of ATACATACTTCTTTACATTCCA (SEQ ID NO: 4679), a nucleotide sequence having at least 50%, 55%, 60%, 65%, 70%, 75%, 80%, 85%, 90%, at least 95%, at least 99%, or 100% sequence identity, or having at least one, two, three, four, five, six, or seven modifications e.g., substitutions (e.g., conservative substitutions), insertions, or deletions, but no more than ten modifications, e.g., substitutions (e.g., conservative substitutions), insertions, or deletions, to SEQ ID NO: 4679, e.g., wherein the modification can result in a mismatch between the encoded miR binding site and the corresponding miRNA. In some embodiments, the viral genome comprises at least 2, 3, 4, or 5 copies of the encoded miR-1 binding site, e.g., an encoded miR-1 binding site series. In some embodiments, the at least 2, 3, 4, or 5 copies (e.g., 2 or 3 copies) of the encoded miR-1 binding site are continuous (e.g., not separated by a spacer) or separated by a spacer. In some embodiments, the spacer is about 1 to 6 nucleotides or about 5 to 10 nucleotides, e.g., about 7-8 nucleotides or about 8 nucleotides, in length. In some embodiments, the spacer sequence comprises one or more of (i) GGAT; (ii) CACGTG; (iii) GCATGC, or a repeat of one or more of (i)-(iii). In some embodiments, the spacer comprises the nucleotide sequence of GATAGTTA, or a nucleotide sequence having at least one, two, or three modifications, e.g., substitutions (e.g., conservative substitutions), insertions, or deletions, but no more than four modifications, e.g., substitutions (e.g., conservative substitutions), insertions, or deletions, of GATAGTTA.

[1326] In some embodiments, the encoded miR binding site is complementary (e.g., fully or partially complementary) to a miR expressed in hematopoietic lineage, including immune cells (e.g., antigen presenting cells or APC, including dendritic cells (DCs), macrophages, and B-lymphocytes). In some embodiments, the encoded miR binding site complementary to a miR expressed in hematopoietic lineage comprises a nucleotide sequence disclosed, e.g., in US 2018/0066279, the contents of which are incorporated by reference herein in its entirety.

[1327] In some embodiments, the encoded miR binding site is complementary (e.g., fully or partially complementary) to a miR expressed in hematopoietic lineage, including immune cells (e.g., antigen presenting cells or APC, including dendritic cells (DCs), macrophages, and B-lymphocytes). In some embodiments, the encoded miR binding site complementary to a miR expressed in hematopoietic lineage comprises a nucleotide sequence disclosed, e.g., in US 2018/0066279, the contents of which are incorporated by reference herein in its entirety.

[1328] In some embodiments, the encoded miR binding site or encoded miR binding site series comprises a miR-142-3p binding site sequence. In some embodiments, the encoded miR-142-3p binding site comprises the nucleotide sequence of TCCATAAAGTAGGAAACACTACA (SEQ ID NO: 4675), a nucleotide sequence having at least 50%, 55%, 60%, 65%, 70%, 75%, 80%, 85%, 90%, at least 95%, at least 99%, or 100% sequence identity, or having at least one, two, three, four, five, six, or seven modifications but no more than ten modifications to SEQ ID NO: 4675, e.g., wherein the modification can result in a mismatch between the encoded miR binding site and the corresponding miRNA. In some embodiments, the viral genome comprises at least 2, 3, 4, or 5 copies of the encoded miR-142-3p binding site, e.g., an encoded miR-142-3p binding site series. In some embodiments, the at least 2, 3, 4, or 5 copies (e.g., 2 or 3 copies) of the encoded miR-142-3p binding site are continuous (e.g., not separated by a spacer) or separated by a spacer. In some embodiments, the spacer is about 1 to 6 nucleotides or about 5 to 10 nucleotides, e.g., about 7-8 nucleotides or about 8 nucleotides, in length. In some embodiments, the spacer sequence comprises one or more of (i) GGAT; (ii) CACGTG; (iii) GCATGC, or a repeat of one or more of (i)-(iii). In some embodiments, the spacer comprises the nucleotide sequence of GATAGTTA, or a nucleotide sequence having at least one, two, or three modifications, but no more than four modifications of GATAGTTA.

[1329] In some embodiments, the encoded miR binding site is complementary (e.g., fully complementary or partially complementary) to a miR expressed in a DRG (dorsal root ganglion) neuron, e.g., a miR183, a miR182, and/or miR96 binding site. In some embodiments, the encoded miR binding site is complementary to a miR expressed in expressed in a DRG neuron comprises a nucleotide sequence disclosed, e.g., in WO2020/132455, the contents of which are incorporated by reference herein in its entirety.

[1330] In some embodiments, the encoded miR binding site or encoded miR binding site series comprises a miR183 binding site sequence. In some embodiments, the encoded miR183 binding site comprises the nucleotide sequence of AGTGAATTCTACCAGTGCCATA (SEQ ID NO: 4676), or a nucleotide sequence having at least 50%, 55%, 60%, 65%, 70%, 75%, 80%, 85%, 90%, at least 95%, at least 99%, or 100% sequence identity, or having at least one, two, three, four, five, six, or seven modifications but no more than ten modifications to SEQ ID NO: 4676, e.g., wherein the modification can result in a mismatch between the encoded miR binding site and the corresponding miRNA. In some embodiments, the sequence complementary to the seed sequence corresponds to the double underlined of the encoded miR-183 binding site sequence. In some embodiments, the viral genome comprises at least comprises at least 2, 3, 4, or 5 copies (e.g., at least 2 or 3 copies) of the encoded miR183 binding site, e.g. an encoded miR183 binding site. In some embodiments, the at least 2, 3, 4, or 5 copies (e.g., 2 or 3 copies) of the encoded miR183 binding site are continuous (e.g., not separated by a spacer) or separated by a spacer. In some embodiments, the spacer is about 1 to 6 nucleotides or about 5 to 10 nucleotides, e.g., about 7-8 nucleotides or about 8 nucleotides, in length. In some embodiments, the spacer comprises the nucleotide sequence of GATAGTTA, or a nucleotide sequence having at least one, two, or three modifications, but no more than four modifications of GATAGTTA. In some embodiments, the spacer sequence comprises one or more of (i) GGAT; (ii) CACGTG; (iii) GCATGC, or a repeat of one or more of (i)-(iii).

[1331] In some embodiments, the encoded miR binding site or the encoded miR binding site series comprises a miR182 binding site sequence. In some embodiments, the encoded miR182 binding site comprises, the nucleotide sequence of AGTGTGAGTTCTACCATTGCCAAA (SEQ ID NO: 4677), a sequence having at least 50%, 55%, 60%, 65%, 70%, 75%, 80%, 85%, 90%, at least 95%, at least 99%, or 100% sequence identity, or having at least one, two, three, four, five, six, or seven modifications but no more than ten modifications to SEQ ID NO: 4677, e.g., wherein the modification can result in a mismatch between the encoded miR binding site and the corresponding miRNA. In some embodiments, the viral genome comprises at least 2, 3, 4, or 5 copies of the encoded miR182 binding site, e.g., an encoded miR182 binding site series. In some embodiments, the at least 2, 3, 4, or 5 copies (e.g., 2 or 3 copies) of the encoded miR182 binding site are continuous (e.g., not separated by a spacer) or separated by a spacer. In some embodiments, the spacer is about 1 to 6 nucleotides or about 5 to 10 nucleotides, e.g., about 7-8 nucleotides or about 8 nucleotides, in length. In some embodiments, the spacer comprises the nucleotide sequence of GATAGTTA, or a nucleotide sequence having at least one, two, or three modifications, but no more than four modifications of GATAGTTA. In some embodiments, the spacer sequence comprises one or more of (i) GGAT; (ii) CACGTG; (iii) GCATGC, or a repeat of one or more of (i)-(iii).

[1332] In some embodiments, the encoded miR binding site or the encoded miR binding site series comprises a miR96 binding site sequence. In some embodiments, the encoded miR96 binding site comprises the nucleotide sequence of AGCAAAAATGTGCTAGTGCCAAA (SEQ ID NO: 4678), a sequence having at least 50%, 55%, 60%, 65%, 70%, 75%, 80%, 85%, 90%, at least 95%, at least 99%, or 100% sequence identity, or having at least one, two, three, four, five, six, or seven modifications but no more than ten modifications to SEQ ID NO: 4678, e.g., wherein the modification can result in a mismatch between the encoded miR binding site and the corresponding miRNA. In some embodiments, the viral genome comprises at least 2, 3, 4, or 5 copies of the encoded miR96 binding site, e.g., an encoded miR96 binding site series. In some embodiments, the at least 2, 3, 4, or 5 copies (e.g., 2 or 3 copies) of the encoded miR96 binding site are continuous (e.g., not separated by a spacer) or separated by a spacer. In some embodiments, the spacer is about 1 to 6 nucleotides or about 5 to 10 nucleotides, e.g., about 7-8 nucleotides or about 8 nucleotides, in length. In some embodiments, the spacer comprises the nucleotide sequence of GATAGTTA, or a nucleotide sequence having at least one, two, or three modifications, but no more than four modifications of GATAGTTA. In some embodiments, the spacer sequence comprises one or more of (i) GGAT; (ii) CACGTG; (iii) GCATGC, or a repeat of one or more of (i)-(iii).

[1333] In some embodiments, the encoded miR binding site series comprises a miR122 binding site, a miR142 binding site, a miR183 binding site, a miR182 binding site, a miR 96 binding site, or a combination thereof. In some embodiments, the encoded miR binding site series comprises at least 2, 3, 4, or 5 copies of a miR122 binding site, a miR142 binding site, a miR183 binding site, a miR182 binding site, a miR 96 binding site, or a combination thereof. In some embodiments, at least two of the encoded miR binding sites are connected directly, e.g., without a spacer. In other embodiments, at least two of the encoded miR binding sites are separated by a spacer, e.g., 1, 2, 3, 4, 5, 6, 7, 8, 9, or 10 nucleotides in length, which is located between two or more consecutive encoded miR binding site sequences. In embodiments, the spacer is at least about 5 to 10 nucleotides, e.g., about 7-8 nucleotides or about 8 nucleotides, in length. In some embodiments, the spacer coding sequence or reverse complement thereof comprises one or more of (i) GGAT; (ii) CACGTG; (iii) GCATGC, or a repeat of one or more of (i)-(iii). In some embodiments, the spacer comprises the nucleotide sequence of GATAGTTA, or a nucleotide sequence having at least one, two, or three modifications, but no more than four modifications of GATAGTTA.

[1334] In some embodiments, an encoded miR binding site series comprises at least 2-5 copies (e.g., 2 or 3 copies) of a combination of at least two, three, four, five, or all of a miR122 binding site, a miR142 binding site, a miR183 binding site, a miR182 binding site, a miR96 binding site, a miR1 binding site, wherein each of the miR binding sites within the series are continuous (e.g., not separated by a spacer) or are separated by a spacer. In some embodiments, the spacer is about 1 to 6 nucleotides or about 5 to 10 nucleotides, e.g., about 7-8 nucleotides or about 8 nucleotides, in length. In some embodiments, the spacer sequence comprises one or more of (i) GGAT; (ii) CACGTG; (iii) GCATGC, or a repeat of one or more of (i)-(iii). In some embodiments, the spacer comprises the nucleotide sequence of GATAGTTA, or a nucleotide sequence having at least one, two, or three modifications, but no more than four modifications of GATAGTTA.

### Viral Genome Component: Polyadenylation Sequence

[1335] In some embodiments, the viral genome of the AAV particles of the present disclosure comprise a polyadenylation sequence. In some embodiments, the viral genome comprises a polyadenylation (referred to herein as poly A, polyA, or poly-A) sequence between the 3′ end of the transgene encoding the payload and the 5′ end of the 3′ITR. In some embodiments, the viral genome comprises two or more polyA sequences. In some embodiments, the viral genome does not comprise a polyA sequence.

[1336] In some embodiments, the viral genome comprises a rabbit globin polyA signal region. In some embodiments, the rabbit globin polyA signal region comprises the nucleotide sequence of SEQ ID NO: 2122, or a nucleotide sequence with at least 70%, 75%, 80%, 85%, 90%, 95%, or 99% sequence identity thereto.

TABLE 13A
PolyA Signal Sequence Regions

| SEQ | |
|---|---|
| ID | |
| NO | Sequence |
| 2122 | GATCTTTTTCCCTCTGCCAAAAATTATGGGGAC |
| | ATCATGAAGCCCCTTGAGCATCTGACTTCTGGC |
| | TAATAAAGGAAATTTATTTTCATTGCAATAGTG |
| | TGTTGGAATTTTTTGTGTCTCTCACTCG |
| 2123 | GGGTGGCATCCCTGTGACCCCTCCCCAGTGCCT |
| | CTCCTGGCCCTGGAAGTTGCCACTCCAGTGCCC |
| | ACCAGCCTTGTCCTAATAAAATTAAGTTGCATC |
| | ATTTTGTCTGACTAGGTGTCCTTCTATAATATT |
| | ATGGGGTGGAGGGGGGTGGTATGGAGCAAGGGG |
| | CAAGTTGGGAAGACAACCTGTAGGGCCTGCGGG |
| | GTCTATTGGGAACCAAGCTGGAGTGCAGTGGCA |
| | CAATCTTGGCTCACTGCAATCTCCGCCTCCTGG |
| | GTTCAAGCGATTCTCCTGCCTCAGCCTCCCGAG |
| | TTGTTGGGATTCCAGGCATGCATGACCAGGCTC |
| | AGCTAATTTTTGTTTTTTTGGTAGAGACGGGGT |
| | TTCACCATATTGGCCAGGCTGGTCTCCAACTCC |
| | TAATCTCAGGTGATCTACCCACCTTGGCCTCCC |
| | AAATTGCTGGGATTACAGGCGTGAACCACTGCT |
| | CCCTTCCCTGTCCTT |
| 2124 | GAATTCACTCCTCAGGTGCAGGCTGCCTATCAG |
| | AAGGTGGTGGCTGGTGTGGCCAATGCCCTGGCT |
| | CACAAATACCACTGAGATCTTTTTCCCTCTGCC |
| | AAAAATTATGGGGACATCATGAAGCCCCTTGAG |
| | CATCTGACTTCTGGCTAATAAAGGAAATTTATT |
| | TTCATTGCAATAGTGTGTTGGAATTTTTTGTGT |
| | CTCTCACTCGGAAGGACATATGGGAGGGCAAAT |
| | CATTTAAAACATCAGAATGAGTATTTGGTTTAG |
| | AGTTTGGCAACATATGCCCATATGCTGGCTGCC |
| | ATGAACAAAGGTTGGCTATAAAGAGGTCATCAG |
| | TATATGAAACAGCCCCCTGCTGTCCATTCCTTA |
| | TTCCATAGAAAAGCCTTGACTTGAGGTTAGATT |
| | TTTTTTATATTTTGTTTTGTGTTATTTTTTTCT |
| | TTAACATCCCTAAAATTTTCCTTACATGTTTTA |
| | CTAGCCAGATTTTTCCTCCTCTCCTGACTACTC |
| | CCAGTCATAGCTGTCCCTCTTCTCTTATGGAGA |
| | TCCCTCGACCTGCAGCCCAAGCTT |

[1337] In some embodiments, the polyA signal region comprises the nucleotide sequence of any one of SEQ ID NOs: 2122-2124, or a sequence with at least 70%, 75%, 80%, 85%, 90%, 95%, or 99% sequence identity thereto. In some embodiments, the polyA signal region comprises the nucleotide sequence of SEQ ID NO: 2122, or a nucleotide sequence with at least 70%, 75%, 80%, 85%, 90%, 95%, or 99% sequence identity thereto.

### Viral Genome Component: Introns

[1338] In some embodiments, the viral genome comprises at least one element to enhance the expression of a transgene encoding a payload. In some embodiments, an element that enhances expression of a transgene comprises an introns or functional variant thereof. In some embodiments, the viral genome comprises an intron or functional variant thereof. In some embodiments, the viral genome comprises at least two intron regions, e.g., at least 2 intron regions, at least 3 intron regions, at least 4 intron regions, or 5 or more intron regions.

[1339] In some embodiments, the viral genome comprises an intron chosen from a MVM intron (67-97 bps), an F.IX truncated intron 1 (300 bps), an β-globin SD/immunoglobulin heavy chain splice acceptor intron (250 bps), an adenovirus splice donor/immunoglobin splice acceptor intron (500 bps), SV40 late splice donor/splice acceptor intron (19S/16S) (180 bps), or a hybrid adenovirus splice donor/IgG splice acceptor intron (230 bps). In some embodiments, the viral genome comprises a human beta-globin intron region. In some embodiments, the human beta-globin intron region comprises the nucleotide sequence of SEQ ID NO: 2097 or 2240, or a nucleotide sequence with at least 70%, 75%, 80%, 85%, 90%, 95% or 99% sequence identity to SEQ ID NO: 2097 or 2240. In some embodiments, the viral genome comprises an ie intron 1 region. In some embodiments, the ie intron 1 region comprises the nucleotide sequence of SEQ ID NO: 2095, or a nucleotide sequence with at least 70%, 75%, 80%, 85%, 90%, 95% or 99% sequence identity thereto. In some embodiments, the viral genome comprises a first human beta-globin intron region, e.g., a first human beta-globin intron region comprising SEQ ID NO: 2240, and a second human beta-globin intron region, e.g., a second human beta-globin intron region comprising SEQ ID NO: 2097. In some embodiments, an ie intron 1 region, e.g., an ie intron 1 region comprising SEQ ID NO: 2095, and a human beta-globin intron region, e.g., a human beta-globin intron region comprising SEQ ID NO: 2240.

[1340] In some embodiments, the viral genome comprises an intron region of any one of SEQ ID NOs: 2095-2105, 2240, or 2256-2258, or a sequence with at least 70%, 75%, 80%, 85%, 90%, 95%, or 99% sequence identity thereto. In some embodiments, the intron region comprises the nucleotide sequence of SEQ ID NO: 2095, or a nucleotide sequence with at least 70%, 75%, 80%, 85%, 90%, 95%, or 99% sequence identity thereto. In some embodiments, the intron region comprises the nucleotide sequence of SEQ ID NO: 2097, or a nucleotide sequence with at least 70%, 75%, 80%, 85%, 90%, 95%, or 99% sequence identity thereto. In some embodiments, the intron region comprises the nucleotide sequence of SEQ ID NO: 2040, or a nucleotide sequence with at least 70%, 75%, 80%, 85%, 90%, 95%, or 99% sequence identity thereto.

TABLE 67A
Intron Sequence Regions

| | SEQ | |
|---|---|---|
| Name | ID NO | Sequence |
| ie1 intron 1- | 2095 | GTAAGTACCGCCTATAGAGTCTATAGGCCCAC |
| Variant 1 | | |
| ie1 intron 1- | 2096 | GTAAGTACCGCCTAT |
| Variant 2 | | |
| HBG intron 2- | 2097 | AAAAAATGCTTTCTTCTTTTAATATACTTTTTTGTTTATCTTATTTCTAATACTTTCCCTAA |
| Variant 1 | | TCTCTTTCTTTCAGGGCAATAATGATACAATGTATCATGCCTCTTTGCACCATTCTAAAGAA |
| | | TAACAGTGATAATTTCTGGGTTAAGGCAATAGCAATATTTCTGCATATAAATATTTCTGCAT |
| | | ATAAATTGTAACTGATGTAAGAGGTTTCATATTGCTAATAGCAGCTACAATCCAGCTACCAT |
| | | TCTGCTTTTATTTTATGGTTGGGATAAGGCTGGATTATTCTGAGTCCAAGCTAGGCCCTTTT |
| | | GCTAATCATGTTCATACCTCTTATCTTCCTCCCACAG |
| HBG intron 2- | 2098 | TCTGCATATAAATTGTAACTGATGTAAGAGGTTTCATATTGCTAATAGCAGCTACAATCCAG |
| Variant 2 | | CTACCATTCTGCTTTTATTTTATGGTTGGGATAAGGCTGGATTATTCTGAGTCCAAGCTAGG |
| | | CCCTTTTGCTAATCATGTTCATACCTCTTATCTTCCTCCCACAG |
| HBG intron 2- | 2099 | AAAAAATGCTTTCTTCTTTTAATATACTTTTCTTTTGCTAATCATGTTCATACCTCTTATCT |
| Variant 3 | | TCCTCCCACAG |
| HBG intron 2- | 2100 | AGGCTGGATTATTCTGAGTCCAAGCTAGGCCCTTTTGCTAATCATGTTCATACCTCTTATCT |
| Variant 4 | | TCCTCCCACAG |
| HBG intron 2- | 2101 | AAAAAATGCTTTCTTCTTTTCAAGCTAGGCCCTTTTGCTAATCATGTTCATACCTCTTATCT |
| Variant 5 | | TCCTCCCACAG |
| HBG intron 2- | 2102 | CAAGCTAGGCCCTTTTGCTAATCATGTTCATACCTCTTATCTTCCTCCCACAG |
| Variant 6 | | |
| SV40 intron | 2103 | GAACTGAAAAACCAGAAAGTTAACTGGTAAGTTTAGTCTTTTTGTCTTTTATTTCAGGTCCC |
| | | GGATCCGGTGGTGGTGCAAATCAAAGAACTGCTCCTCAGTGGATGTTGCCTTTACTTCTAGG |
| | | CCTGTACGGAAGTGTTACTTCTGCTCTAAAAGCTGCGGAATTGTACCC |
| Chimeric | 2104 | GGAGTCGCTGCGCGCTGCCTTCGCCCCGTGCCCCGCTCCGCCGCCGCCTCGCGCCGCCCGCC |
| intron | | CCGGCTCTGACTGACCGCGTTACTCCCACAGGTGAGCGGGCGGGACGGCCCTTCTCCTCCGG |
| | | GCTGTAATTAGCGCTTGGTTTAATGACGGCTTGTTTCTTTTCTGTGGCTGCGTGAAAGCCTT |
| | | GAGGGGCTCCGGGAGGGCCCTTTGTGCGGGGGGAGCGGCTCGGGGGGTGCGTGCGTGTGTGT |
| | | GTGCGTGGGGAGCGCCGCGTGCGGCTCCGCGCTGCCCGGCGGCTGTGAGCGCTGCGGGCGCG |
| | | GCGCGGGGCTTTGTGCGCTCCGCAGTGTGCGCGAGGGGAGCGCGGCCGGGGGCGGTGCCCCG |
| | | CGGTGCGGGGGGGGCTGCGAGGGGAACAAAGGCTGCGTGCGGGGTGTGTGCGTGGGGGGGTG |
| | | AGCAGGGGGTGTGGGCGCGTCGGTCGGGCTGCAACCCCCCCTGCACCCCCCTCCCCGAGTTG |
| | | CTGAGCACGGCCCGGCTTCGGGTGCGGGGCTCCGTACGGGGCGTGGCGCGGGGCTCGCCGTG |
| | | CCGGGCGGGGGGTGGCGGCAGGTGGGGGTGCCGGGCGGGGCGGGGCCGCCTCGGGCCGGGGA |
| | | GGGCTCGGGGGAGGGGCGCGGCGGCCCCCGGAGCGCCGGCGGCTGTCGAGGCGCGGCGAGCC |
| | | GCAGCCATTGCCTTTTATGGTAATCGTGCGAGAGGGCGCAGGGACTTCCTTTGTCCCAAATC |
| | | TGTGCGGAGCCGAAATCTGGGAGGCGCCGCCGCACCCCCTCTAGCGGGCGCGGGGCGAAGCG |
| | | GTGCGGCGCCGGCAGGAAGGAAATGGGCGGGGAGGGCCTTCGTGCGTCGCCGCGCCGCCGTC |
| | | CCCTTCTCCCTCTCCAGCCTCGGGGCTGTCCGCGGGGGGACGGCTGCCTTCGGGGGGGACGG |
| | | GGCAGGGCGGGGTTCGGCTTCTGGCGTGTGACCGGCGGCTCTAGAGCCTCTGCTAACCATGT |
| | | TCATGCCTTCTTCTTTTTCCTACAGCTCCTGGGCAACGTGCTGGTTATTGTGCTGTCTCATC |
| | | ATTTTGGCAAAGAATTCGAG |
| Rbt | 2105 | CCTCTGCTAACCATGTTCATGCCTTCTTCTTTTTCCTACAG |
| betaglobin | | |
| intron2 | | |
| HGB intron | 2240 | TCAGATCGCCTGGAGACGCCATCCACGCTGTTTTGACCTCCATAGAAGACACCGGGACCGAT |
| variant 1 | | CCAGCCTCCGCGGATTCGAATCCCGGCCGGGAACGGTGCATTGGAACGCGGATTCCCCGTGC |
| | | CAAGAGTGACGTAAGTACCGCCTATAGAGTCTATAGGCCCACAAAAAATGCTTTCTTCTTTT |
| | | AATATACTTTTTTGTTTATCTTATTTCTAATACTTTCCCTAATCTCTTTCTTTCAGGGCAAT |
| | | AATGATACAATGTATCATGCCTCTTTGCACCATTCTAAAGAATAACAGTGATAATTTCTGGG |
| | | TTAAGGCAATAGCAATATTTCTGCATATAAATATTTCTGCATATAAATTGTAACTGATGTAA |
| | | GAGGTTTCATATTGCTAATAGCAGCTACAATCCAGCTACCATTCTGCTTTTATTTTATGGTT |
| | | GGGATAAGGCTGGATTATTCTGAGTCCAAGCTAGGCCCTTTTGCTAATCATGTTCATACCTC |
| | | TTATCTTCCTCCCACAGCTCCTGGGCAACGTGCTGGTCTGTGTGCTGGCCCATCACTTTGGC |
| | | AAAGAATT |
| HGB intron | 2256 | ATTCGAATCCCGGCCGGGAACGGTGCATTGGAACGCGGATTCCCCGTGCCAAGAGTGACGTA |
| variant 2 | | AGTACCGCCTATAGAGTCTATAGGCCCACAAAAAATGCTTTCTTCTTTTAATATACTTTTTT |
| | | GTTTATCTTATTTCTAATACTTTCCCTAATCTCTTTCTTTCAGGGCAATAATGATACAATGT |
| | | ATCATGCCTCTTTGCACCATTCTAAAGAATAACAGTGATAATTTCTGGGTTAAGGCAATAGC |
| | | AATATTTCTGCATATAAATATTTCTGCATATAAATTGTAACTGATGTAAGAGGTTTCATATT |
| | | GCTAATAGCAGCTACAATCCAGCTACCATTCTGCTTTTATTTTATGGTTGGGATAAGGCTGG |
| | | ATTATTCTGAGTCCAAGCTAGGCCCTTTTGCTAATCATGTTCATACCTCTTATCTTCCTCCC |
| | | ACAGCTCCTGGGCAACGTGCTGGTCTGTGTGCTGGCCCATCACTTTGGCAAAGAATT |
| HGB intron | 2257 | TCAGATCGCCTGGAGACGCCATCCACGCTGTTTTGACCTCCATAGAAGACACCGGGACCGAT |
| variant 3 | | CCAGCCTCCGCGGATTCGAATCCCGGCCGGGAACGGTGCATTGGAACGCGGATTCCCCGTGC |
| | | CAAGAGTGACGTAAGTACCGCCTATAGAGTCTATAGGCCCACTCTGCATATAAATTGTAACT |
| | | GATGTAAGAGGTTTCATATTGCTAATAGCAGCTACAATCCAGCTACCATTCTGCTTTTATTT |
| | | TATGGTTGGGATAAGGCTGGATTATTCTGAGTCCAAGCTAGGCCCTTTTGCTAATCATGTTC |
| | | ATACCTCTTATCTTCCTCCCACAGCTCCTGGGCAACGTGCTGGTCTGTGTGCTGGCCCATCA |
| | | CTTTGGCAAAGAATT |
| HGB intron | 2258 | TCAGATCGCCTGGAGACGCCATCCACGCTGTTTTGACCTCCATAGAAGACACCGGGACCGAT |
| variant 4 | | CCAGGTAAGTACCGCCTATAGAGTCTATAGGCCCACAAAAAATGCTTTCTTCTTTTAATATA |
| | | CTTTTTTGTTTATCTTATTTCTAATACTTTCCCTAATCTCTTTCGCTGGATTATTCTGAGTC |
| | | CAAGCTAGGCCCTTTTGCTAATCATGTTCATACCTCTTATCTTCCTCCCACAGCTCCTGGGC |
| | | AACGTGCTGGTCTGTGTGCTGGCCCATCACTTTGGCAAAGAATT |

### Viral Genome Component: Exons

[1341] In some embodiments, the viral genome comprises an exon sequence region. In some embodiments, the viral genome comprises at least 2, at least 3, at least 4, or at least 5 exon regions. In some embodiments, the viral genome comprises 2 exon regions.

[1342] In some embodiments, the viral genome comprises an ie exon 1 region. In some embodiments, the ie exon 1 region comprises the nucleotide sequence of SEQ ID NO: 2090, or a nucleotide sequence with at least 70%, 75%, 80%, 85%, 90%, 95%, or 99% sequence identity thereto. In some embodiments, the viral genome comprises a human beta-globin exon region. In some embodiments, the human beta-globin exon region comprises a nucleotide sequence of SEQ ID NO: 2093 or a sequence with at least 70%, 75%, 80%, 85%, 90%, 95%, or 99% sequence identity thereto. In some embodiments, the viral genome comprises an ie exon 1 region and a human beta-globin exon region.

[1343] In some embodiments, the exon region comprises the nucleotide sequence of any one of SEQ ID NOs: 2090-2094, or a nucleotide sequence with at least 70%, 75%, 80%, 85%, 90%, 95%, or 99% sequence identity thereto. In some embodiments, the exon region comprises the nucleotide sequence of SEQ ID NO: 2090, or a nucleotide sequence with at least 70%, 75%, 80%, 85%, 90%, 95%, or 99% sequence identity thereto. In some embodiments, the exon region comprises the nucleotide sequence of SEQ ID NO: 2093, or a nucleotide sequence with at least 70%, 75%, 80%, 85%, 90%, 95%, or 99% sequence identity thereto.

TABLE 66A
Exon Sequence Regions

| | SEQ ID | |
|---|---|---|
| Description | NO | Sequence |
| ie1 exon 1- | 2090 | TCAGATCGCCTGGAGACGCCATCCA |
| variant 1 | | CGCTGTTTTGACCTCCATAGAAGAC |
| | | ACCGGGACCGATCCAGCCTCCGCGG |
| | | ATTCGAATCCCGGCCGGGAACGGTG |
| | | CATTGGAACGCGGATTCCCCGTGCC |
| | | AAGAGTGAC |
| ie1 exon 1- | 2091 | TTGACCTCCATAGAAGACACCGGGA |
| variant 2 | | CCGATCCAGCCTCCGCGGATTCGAA |
| | | TCCCGGCCGGGAACGGTGCATTGGA |
| | | ACGCGGATTCCCCGTGCCAAGAGTG |
| | | AC |
| ie1 exon 1- | 2092 | ATTCGAATCCCGGCCGGGAACGGTG |
| variant 3 | | CATTGGAACGCGGATTCCCCGTGCC |
| | | AAGAGTGAC |
| Human beta | 2093 | CTCCTGGGCAACGTGCTGGTCTGTG |
| globin | | TGCTGGCCCATCACTTTGGCAAAGA |
| (HBG) exon3 | | ATT |
| rabbit beta | 2094 | CTCCTGGGCAACGTGCTGGTTATTG |
| globin | | TGCTGTCTCATCATTTTGGCAAAGA |
| (RBG) exon 3 | | ATTC |

### Payloads

[1344] In some embodiments, an AAV particle, e.g., an AAV particle for the vectorized delivery of an antibody or fragment thereof described herein (e.g., an anti-tau antibody), comprises a payload. In some embodiments, an AAV particle described herein comprises at least two, at least three, or at least 4 payloads. In some embodiments, an AAV particle, e.g., an AAV particle for the vectorized delivery of an antibody or fragment thereof described herein (e.g., an anti-tau antibody), comprises a nucleic acid comprising a transgene encoding a payload. In some embodiments, the payload comprises an antibody, e.g., an anti-tau antibody. In some embodiments, the payload comprises a secreted protein, an intracellular protein, an extracellular protein, a membrane protein, a structural protein, a functional protein, or a protein, e.g., a mammalian protein, involved in immune system regulation. In some embodiments, a nucleic acid comprises a transgene encoding an antibody that binds to tau.

[1345] In some embodiments, the nucleic acid molecule comprising the transgene encoding a payload further comprises a nucleotide sequence encoding a linker (e.g., a linker connecting a heavy chain variable region (VH) and a light chain variable region (VL) of an antibody) and/or a cleavage site. In some embodiments, the nucleic acid molecule comprising the transgene encoding a payload further comprises a nucleotide sequence encoding a signal sequence.

[1346] In some embodiments, the nucleic acid encoding the payload may be constructed, e.g., organized, similar to, e.g., mirroring, the natural organization of an mRNA. In some embodiments, the nucleic acid encoding the payload may comprise coding and/or non-coding nucleotide sequences. In some embodiments, the nucleic acid encoding the payload may encode a coding and/or a non-coding RNA.

[1347] In such an embodiment, the nucleic acid comprising a transgene encoding a payload (e.g., an antibody or fragment thereof) is replicated and packaged into an AAV particle. In some embodiments, following transduction of a cell with an AAV particle comprising a payload (e.g., an antibody or fragment thereof), the cell expresses the payload. In some embodiments, the payload, e.g., antibody or fragment thereof, produced by a cell transduced by an AAV particle comprising the payload, is secreted from the cell.

### Antibodies

[1348] In some embodiments, the present disclosure provides antibodies that interact with human microtubule associated protein tau as a payload. Such antibodies that bind tau protein epitopes, referred to herein as “anti-tau antibodies.” Dysfunction and/or aggregation of tau is found in a class of neurodegenerative diseases referred to as tauopathies. Tau hyperphosphorylation leads to aggregation and depressed tau-dependent microtubule assembly. In tauopathies, the tau aggregates form paired helical filaments (PHF) found in neurofibrillary tangles (NFTs). These aggregates lead to neuronal loss and cognitive decline. Anti-tau antibodies of the present disclosure may be useful for treating and/or diagnosing tauopathies, as well as other applications described herein.

[1349] As used herein, the term “antibody” is referred to in the broadest sense and specifically covers various embodiments including, but not limited to monoclonal antibodies, polyclonal antibodies, multispecific antibodies (e.g. bispecific antibodies formed from at least two intact antibodies), single chain Fv (scFv) formats, and antibody fragments (e.g., Fab, F(ab′), F(ab′)₂, or Fv), so long as they exhibit a functional or biological activity. Antibodies are primarily amino-acid based molecules but may also include one or more modifications (including, but not limited to the addition of sugar moieties, fluorescent moieties, chemical tags). In some embodiments, the antibody is a full-length antibody.

[1350] Antibodies of the present disclosure may include, but are not limited to, polyclonal, monoclonal antibodies, multispecific antibodies, bispecific antibodies, trispecific antibodies, human antibodies, humanized antibodies, chimeric antibodies, single chain antibodies, diabodies, linear antibodies, Fab fragments, F(ab′) fragments, F(ab′)₂ fragments, Fv fragments, single-chain Fv fragment (scFv), fragments produced by a Fab expression library, variable domains, anti-idiotypic (anti-Id) antibodies (including, e.g., anti-Id antibodies to antibodies of the invention), intracellularly made antibodies (i.e., intrabodies), codon-optimized antibodies, tandem scFv antibodies, bispecific T-cell engagers, mAb2 antibodies, chimeric antigen receptors (CAR), tetravalent bispecific antibodies, biosynthetic antibodies, native antibodies, miniaturized antibodies, unibodies, maxibodies, intrabodies, camelid antibodies, and epitope-binding fragments of any of the above.

[1351] As used herein, the term “antibody fragment” refers to a portion of an intact antibody or fusion-protein thereof, in some cases including at least one antigen binding region. Examples of antibody fragments include Fab, Fab′, F(ab′)₂, Fv fragments, single-chain variable fragments (scFvs); diabodies; tri(a)bodies; linear antibodies; single-chain antibodies; and multispecific antibodies formed from antibody fragments. Papain digestion of antibodies produces two identical antigen-binding fragments, called “Fab” fragments, each with a single antigen-binding site. Also produced is a residual “Fc” fragment, whose name reflects its ability to crystallize readily. Pepsin treatment yields an F(ab′)₂ fragment that has two antigen-binding sites and is still capable of cross-linking antigen. Antibodies of the present disclosure may include one or more of these fragments and may, for example, be generated through enzymatic digestion of whole antibodies or through recombinant expression.

[1352] “Native antibodies” are usually heterotetrameric glycoproteins of about 150,000 Daltons, composed of two identical light (L) chains and two identical heavy (H) chains. Genes encoding antibody heavy and light chains are known and segments making up each have been well characterized and described (Matsuda, F. et al., 1998. The Journal of Experimental Medicine. 188(11); 2151-62 and Li, A. et al., 2004. Blood. 103(12: 4602-9, the content of each of which are herein incorporated by reference in their entirety). Each light chain is linked to a heavy chain by one covalent disulfide bond, while the number of disulfide linkages varies among the heavy chains of different immunoglobulin isotypes. Each heavy and light chain also has regularly spaced intrachain disulfide bridges. Each heavy chain has at one end a variable domain (V_{H}) followed by a number of constant domains. Each light chain has a variable domain at one end (V_{L}) and a constant domain at its other end; the constant domain of the light chain is aligned with the first constant domain of the heavy chain, and the light chain variable domain is aligned with the variable domain of the heavy chain.

[1353] As used herein, the term “variable domain” refers to specific antibody domains found on both the antibody heavy and light chains that differ extensively in sequence among antibodies and are used in the binding and specificity of each particular antibody for its particular antigen. Variable domains include hypervariable regions. As used herein, the term “hypervariable region” refers to a region within a variable domain that includes amino acid residues responsible for antigen binding. The amino acids present within the hypervariable regions determine the structure of the complementarity determining regions (CDRs) that become part of the antigen-binding site of the antibody. As used herein, the term “CDR” refers to a region of an antibody that includes a structure that is complimentary to its target antigen or epitope. Other portions of the variable domain, not interacting with the antigen, are each referred to as a “framework region” (FR). The antigen-binding site (also known as the antigen combining site or paratope) includes the amino acid residues necessary to interact with a particular antigen. The exact residues making up the antigen-binding site may be determined by CDR analysis. As used herein, the term “CDR analysis” refers to any process used to determine which antibody variable domain residues make up the CDRs. CDR analysis may be conducted by co-crystallography with bound antigen. In some embodiments, CDR analysis may include computational assessments based on comparisons with other antibodies (Strohl, W. R. Therapeutic Antibody Engineering. Woodhead Publishing, Philadelphia PA. 2012. Ch. 3, p47-54, the contents of which are herein incorporated by reference in their entirety). CDR analysis may include the use of numbering schemes including, but not limited to, those taught by Kabat [Wu, T. T. et al., 1970, JEM, 132(2):211-50 and Johnson, G. et al., 2000, Nucleic Acids Res. 28(1): 214-8, the contents of each of which are herein incorporated by reference in their entirety], Chothia [Chothia and Lesk, J. Mol. Biol. 196, 901 (1987), Chothia et al., Nature 342, 877 (1989), and Al-Lazikani, B. et al., 1997, J. Mol. Biol. 273(4):927-48, the contents of each of which are herein incorporated by reference in their entirety], Lefranc (Lefranc, M. P. et al., 2005, Immunome Res. 1:3), and Honegger (Honegger, A. and Pluckthun, A. 2001. J. Mol. Biol. 309(3):657-70, the contents of which are herein incorporated by reference in their entirety).

[1354] The precise amino acid sequence boundaries of a given CDR can be determined using any of a number of well-known schemes, including those described by Kabat et al. (1991), “Sequences of Proteins of Immunological Interest,” 5th Ed. Public Health Service, National Institutes of Health, Bethesda, MD (Kabat numbering scheme), Al-Lazikani et al., (1997) JMB 273, 927-948 (Chothia numbering scheme). In some embodiments, the CDRs defined according the Chothia number scheme are also sometimes referred to as hypervariable loops.

[1355] For example, under Kabat, the CDR amino acid residues in the heavy chain variable domain (VH) are numbered 31-35 (HCDR1), 50-65 (HCDR2), and 95-102 (HCDR3); and the CDR amino acid residues in the light chain variable domain (VL) are numbered 24-34 (LCDR1), 50-56 (LCDR2), and 89-97 (LCDR3). Under Chothia the CDR amino acids in the VH are numbered 26-32 (HCDR1), 52-56 (HCDR2), and 95-102 (HCDR3); and the amino acid residues in VL are numbered 26-32 (LCDR1), 50-52 (LCDR2), and 91-96 (LCDR3). By combining the CDR definitions of both Kabat and Chothia, the CDR amino acid residues are numbered 26-35 (HCDR1), 50-65 (HCDR2), and 95-102 (HCDR3) in human VH and the CDR amino acid residues are numbered 24-34 (LCDR1), 50-56 (LCDR2), and 89-97 (LCDR3) in human VL.

[1356] VH and VL domains have three CDRs each. VL CDRs are referred to herein as CDRL1, CDRL2 and CDRL3, in order of occurrence when moving from N- to C-terminus along the variable domain polypeptide. VH CDRs are referred to herein as CDRH1, CDRH2 and CDRH3, in order of occurrence when moving from N- to C-terminus along the variable domain polypeptide. Each of the CDRs have favored canonical structures with the exception of the CDRH3, which includes amino acid sequences that may be highly variable in sequence and length between antibodies resulting in a variety of three-dimensional structures in antigen-binding domains (Nikoloudis, D. et al., 2014. PeerJ. 2:e456). In some cases, CDRH3s may be analyzed among a panel of related antibodies to assess antibody diversity. Various methods of determining CDR sequences are known in the art and may be applied to known antibody sequences (Strohl, W. R. Therapeutic Antibody Engineering. Woodhead Publishing, Philadelphia PA. 2012. Ch. 3, p47-54, the contents of which are herein incorporated by reference in their entirety).

[1357] VH and VL domains each have four framework regions (FRs) located before, after, and between CDR regions. VH framework regions are referred to herein as FRH1, FRH2, FRH3, and FRH4 and VL framework regions are referred to herein as FRL1, FRL2, FRL3, and FRL4. On VH domains, FRs and CDRs are typically in the order of FRH1-CDRH1-FRH2-CDRH2-FRH3-CDRH3-FRH4, from N-terminus to C-terminus. On VL domains, FRs and CDRs are typically in the order of FRL1-CDRL1-FRL2-CDRL2-FRL3-CDRL3-FRL4, from N-terminus to C-terminus.

[1358] As used herein, the term “Fv” refers to an antibody fragment that includes the minimum fragment on an antibody needed to form a complete antigen-binding site. These regions consist of a dimer of one heavy chain and one light chain variable domain in tight, non-covalent association. Fv fragments can be generated by proteolytic cleavage, but are largely unstable. Recombinant methods are known in the art for generating stable Fv fragments, typically through insertion of a flexible linker between the light chain variable domain and the heavy chain variable domain [to form a single chain Fv (scFv)] or through the introduction of a disulfide bridge between heavy and light chain variable domains (Strohl, W.R. Therapeutic Antibody Engineering. Woodhead Publishing, Philadelphia PA. 2012. Ch. 3, p46-47, the contents of which are herein incorporated by reference in their entirety).

[1359] Antibody “light chains” from any vertebrate species can be assigned to one of two clearly distinct types, called kappa and lambda based on amino acid sequences of their constant domains. Depending on the amino acid sequence of the constant domain of their heavy chains, antibodies can be assigned to different classes.

[1360] As used herein, the term “single chain Fv” or “scFv” refers to a fusion protein of VH and VL antibody domains, wherein these domains are linked together into a single polypeptide chain by a flexible peptide linker. In some embodiments, the Fv polypeptide linker enables the scFv to form the desired structure for antigen binding. In some embodiments, scFvs are utilized in conjunction with phage display, yeast display or other display methods where they may be expressed in association with a surface member (e.g. phage coat protein) and used in the identification of high affinity peptides for a given antigen. In some embodiments, antibodies of the present disclosure are prepared as scFvFc antibodies. The term “scFvFc” refers to an antibody format which includes the fusion of one or more scFv with an antibody Fc domain.

[1361] The term “chimeric antibody” refers to an antibody with portions derived from two or more sources. Chimeric antibodies may include portions derived from different species. For example, chimeric antibodies may include antibodies with mouse variable domains and human constant domains. Further examples of chimeric antibodies and methods for producing them include any of those described in Morrison, S. L., Transfectomas provide novel chimeric antibodies. Science. 1985 Sep. 20; 229(4719):1202-7; Gillies, S. D. et al., High-level expression of chimeric antibodies using adapted cDNA variable region cassettes. J Immunol Methods. 1989 Dec. 20; 125(1-2):191-202.; and U.S. Pat. Nos. 5,807,715; 4,816,567; and 4,816,397, the contents of each of which are incorporated herein by reference in their entirety.

[1362] The term “diabodies” refers to small antibody fragments with two antigen-binding sites, which fragments include a heavy chain variable domain V_{H} connected to a light chain variable domain V_{L} in the same polypeptide chain. By using a linker that is too short to allow pairing between the two domains on the same chain, the domains are forced to pair with the complementary domains of another chain and create two antigen-binding sites. Diabodies are described more fully in, for example, EP 404,097; WO 93/11161; and Hollinger et al., Proc. Natl. Acad. Sci. USA, 90:6444-6448 (1993), the contents of each of which are incorporated herein by reference in their entirety.

[1363] The term “intrabody” refers to a form of antibody that is not secreted from a cell in which it is produced, but instead targets one or more intracellular protein(s). Intrabodies may be used to affect a multitude of cellular processes including, but not limited to intracellular trafficking, transcription, translation, metabolic processes, proliferative signaling and cell division. In some embodiments, methods of the present invention may include intrabody-based therapies. In some such embodiments, variable domain sequences and/or CDR sequences disclosed herein may be incorporated into one or more constructs for intrabody-based therapy. In some cases, intrabodies of the invention may target one or more glycated intracellular proteins or may modulate the interaction between one or more glycated intracellular protein and an alternative protein.

[1364] The term “chimeric antigen receptor” or “CAR” as used herein, refers to artificial receptors that are engineered to be expressed on the surface of immune effector cells resulting in specific targeting of such immune effector cells to cells expressing entities that bind with high affinity to the artificial receptors. CARs may be designed to include one or more segments of an antibody, antibody variable domain and/or antibody CDR, such that when such CARs are expressed on immune effector cells, the immune effector cells bind and clear any cells that are recognized by the antibody portions of the CARs. In some cases, CARs are designed to specifically bind cancer cells, leading to immune-regulated clearance of the cancer cells.

[1365] The term “monoclonal antibody” as used herein refers to an antibody obtained from a population of substantially homogeneous cells (or clones), i.e., the individual antibodies making up the population are identical and/or bind the same epitope, except for possible variants that may arise during production of the monoclonal antibody, such variants generally being present in minor amounts. In contrast to polyclonal antibody preparations that typically include different antibodies directed against different determinants (epitopes), each monoclonal antibody is directed against a single determinant on the antigen

[1366] The modifier “monoclonal” indicates the character of the antibody as being obtained from a substantially homogeneous population of antibodies, and is not to be construed as requiring production of the antibody by any particular method. The monoclonal antibodies herein include “chimeric” antibodies (immunoglobulins) in which a portion of the heavy and/or light chain is identical with or homologous to corresponding sequences in antibodies derived from a particular species or belonging to a particular antibody class or subclass, while the remainder of the chain(s) is identical with or homologous to corresponding sequences in antibodies derived from another species or belonging to another antibody class or subclass, as well as fragments of such antibodies.

[1367] Antibodies of the present disclosure may be from any animal origin including mammals, birds, reptiles, and insects. Mammalian antibodies may be, for example, of human, murine (e.g., mouse or rat), donkey, sheep, rabbit, goat, guinea pig, camel, bovine, or horse origin.

[1368] In some embodiments, antibodies of the present disclosure may be antibody mimetics. The term “antibody mimetic” refers to any molecule which mimics the function or effect of an antibody and which binds specifically and with high affinity to their molecular targets. In some embodiments, antibody mimetics may be monobodies, designed to incorporate the fibronectin type III domain (Fn3) as a protein scaffold (U.S. Pat. Nos. 6,673,901; 6,348,584). In some embodiments, antibody mimetics may be those known in the art including, but are not limited to affibody molecules, affilins, affitins, anticalins, avimers, DARPins, Fynomers and Kunitz and domain peptides. In other embodiments, antibody mimetics may include one or more non-peptide region.

[1369] As used herein, the term “antibody variant” refers to a biomolecule resembling an antibody in structure, sequence and/or function, but including some differences in their amino acid sequence, composition or structure as compared to another antibody or a native antibody.

### Intrabody

[1370] In some embodiments, payloads may encode intrabodies. Intrabodies are a form of antibody that is not secreted from a cell in which it is produced, but instead targets one or more intracellular proteins. Intrabodies are expressed and function intracellularly, and may be used to affect a multitude of cellular processes including, but not limited to intracellular trafficking, transcription, translation, metabolic processes, proliferative signaling and cell division. In some embodiments, methods described herein include intrabody-based therapies. In some such embodiments, variable domain sequences and/or CDR sequences disclosed herein are incorporated into one or more constructs for intrabody-based therapy. For example, intrabodies may target one or more glycated intracellular proteins or may modulate the interaction between one or more glycated intracellular proteins and an alternative protein.

[1371] More than two decades ago, intracellular antibodies against intracellular targets were first described (Biocca, Neuberger and Cattaneo EMBO J. 9: 101-108, 1990). The intracellular expression of intrabodies in different compartments of mammalian cells allows blocking or modulation of the function of endogenous molecules (Biocca, et al., EMBO J. 9: 101-108, 1990; Colby et al., Proc. Natl. Acad. Sci. U.S.A. 101: 17616-21, 2004). Intrabodies can alter protein folding, protein-protein, protein-DNA, protein-RNA interactions and protein modification. They can induce a phenotypic knockout and work as neutralizing agents by direct binding to the target antigen, by diverting its intracellular trafficking or by inhibiting its association with binding partners. They have been largely employed as research tools and are emerging as therapeutic molecules for the treatment of human diseases such as viral pathologies, cancer and misfolding diseases. The fast-growing bio-market of recombinant antibodies provides intrabodies with enhanced binding specificity, stability, and solubility, together with lower immunogenicity, for their use in therapy (Biocca, abstract in Antibody Expression and Production Cell Engineering Volume 7, 2011, pp. 179-195).

[1372] In some embodiments, intrabodies have advantages over interfering RNA (iRNA); for example, iRNA has been shown to exert multiple non-specific effects, whereas intrabodies have been shown to have high specificity and affinity to target antigens. Furthermore, as proteins, intrabodies possess a much longer active half-life than iRNA. Thus, when the active half-life of the intracellular target molecule is long, gene silencing through iRNA may be slow to yield an effect, whereas the effects of intrabody expression can be almost instantaneous. Lastly, it is possible to design intrabodies to block certain binding interactions of a particular target molecule, while sparing others.

[1373] Intrabodies are often single chain variable fragments (scFvs) expressed from a recombinant nucleic acid molecule and engineered to be retained intracellularly (e.g., retained in the cytoplasm, endoplasmic reticulum, or periplasm). Intrabodies may be used, for example, to ablate the function of a protein to which the intrabody binds. The expression of intrabodies may also be regulated through the use of inducible promoters in the nucleic acid expression vector comprising the intrabody. Intrabodies may be produced for use in the viral genomes using methods known in the art, such as those disclosed and reviewed in: (Marasco et al., 1993 Proc. Natl. Acad. Sci. USA, 90: 7889-7893; Chen et al., 1994, Hum. Gene Ther. 5:595-601; Chen et al., 1994, Proc. Natl. Acad. Sci. USA, 91: 5932-5936; Maciejewski et al., 1995, Nature Med., 1: 667-673; Marasco, 1995, Immunotech, 1: 1-19; Mhashilkar, et al., 1995, EMBO J. 14: 1542-51; Chen et al., 1996, Hum. Gene Therap., 7: 1515-1525; Marasco, Gene Ther. 4:11-15, 1997; Rondon and Marasco, 1997, Annu. Rev. Microbiol. 51:257-283; Cohen, et al., 1998, Oncogene 17:2445-56; Proba et al., 1998, J. Mol. Biol. 275:245-253; Cohen et al., 1998, Oncogene 17:2445-2456; Hassanzadeh, et al., 1998, FEBS Lett. 437:81-6; Richardson et al., 1998, Gene Ther. 5:635-44; Ohage and Steipe, 1999, J. Mol. Biol. 291:1119-1128; Ohage et al., 1999, J. Mol. Biol. 291:1129-1134; Wirtz and Steipe, 1999, Protein Sci. 8:2245-2250; Zhu et al., 1999, J. Immunol. Methods 231:207-222; Arafat et al., 2000, Cancer Gene Ther. 7:1250-6; der Maur et al., 2002, J. Biol. Chem. 277:45075-85; Mhashilkar et al., 2002, Gene Ther. 9:307-19; and Wheeler et al., 2003, FASEB J. 17: 1733-5; and references cited therein). In particular, a CCRS intrabody has been produced by Steinberger et al., 2000, Proc. Natl. Acad. Sci. USA 97:805-810). See generally Marasco, WA, 1998, “Intrabodies: Basic Research and Clinical Gene Therapy Applications” Springer: New York; and for a review of scFvs, see Pluckthun in “The Pharmacology of Monoclonal Antibodies,” 1994, vol. 113, Rosenburg and Moore eds. Springer-Verlag, New York, pp. 269-315.

[1374] Sequences from donor antibodies may be used to develop intrabodies. Intrabodies are often recombinantly expressed as single domain fragments such as isolated VH and VL domains or as a single chain variable fragment (scFv) antibody within the cell. For example, intrabodies are often expressed as a single polypeptide to form a single chain antibody comprising the variable domains of the heavy and light chains joined by a flexible linker polypeptide. Intrabodies typically lack disulfide bonds and are capable of modulating the expression or activity of target genes through their specific binding activity. Single chain antibodies can also be expressed as a single chain variable region fragment joined to the light chain constant region.

[1375] As is known in the art, an intrabody can be engineered into recombinant polynucleotide vectors to encode sub-cellular trafficking signals at its N or C terminus to allow expression at high concentrations in the sub-cellular compartments where a target protein is located. For example, intrabodies targeted to the endoplasmic reticulum (ER) are engineered to incorporate a leader peptide and, optionally, a C-terminal ER retention signal, such as the KDEL amino acid motif (SEQ ID NO: 4545). Intrabodies intended to exert activity in the nucleus are engineered to include a nuclear localization signal. Lipid moieties are joined to intrabodies in order to tether the intrabody to the cytosolic side of the plasma membrane. Intrabodies can also be targeted to exert function in the cytosol. For example, cytosolic intrabodies are used to sequester factors within the cytosol, thereby preventing them from being transported to their natural cellular destination.

[1376] There are certain technical challenges with intrabody expression. In particular, protein conformational folding and structural stability of the newly synthesized intrabody within the cell is affected by reducing conditions of the intracellular environment.

[1377] Intrabodies may be promising therapeutic agents for the treatment of misfolding diseases, including tauopathies, prion diseases, Alzheimer's, Parkinson's, and Huntington's, because of their virtually infinite ability to specifically recognize the different conformations of a protein, including pathological isoforms, and because they can be targeted to the potential sites of aggregation (both intra- and extracellular sites). These molecules can work as neutralizing agents against amyloidogenic proteins by preventing their aggregation, and/or as molecular shunters of intracellular traffic by rerouting the protein from its potential aggregation site (Cardinale, and Biocca, Curr. Mol. Med. 2008, 8:2-11).

### Antibody Development

[1378] Antibodies according to the present disclosure may be developed using methods standard in the art. Two primary antibody preparation technologies are immunization and antibody display technology. In either case, desired antibodies are identified from a larger pool of candidates based on affinity for a specific target or epitope. An immune response is characterized by the reaction of the cells, tissues and/or organs of an organism to the presence of a foreign entity. Such an immune response typically leads to the production by the organism of one or more antibodies against the foreign entity, e.g., antigen or a portion of the antigen.

### Antigens

[1379] Antibodies may be developed (e.g., through immunization) or selected (e.g., from pool of candidates), for example, using any naturally occurring or synthetic antigen. As used herein, an “antigen” is an entity which induces or evokes an immune response in an organism and may also refer to an antibody binding partner. An immune response is characterized by the reaction of the cells, tissues and/or organs of an organism to the presence of a foreign entity. Such an immune response typically leads to the production by the organism of one or more antibodies against the foreign entity. In some embodiments, antigens include tau proteins. As used herein, the term “tau protein” refers to proteins or protein complexes that include microtubule-associated protein tau or peptide fragments thereof. Tau proteins may include enriched paired helical filament tau protein (ePHF), also referred to as “sarkosyl insoluble tau,” or fragments thereof. Tau proteins may include one or more phosphorylated residues. Such phosphorylated residues may correspond to tau proteins associated with disease (also referred to herein as “pathological tau.”

### Immunization

[1380] In some embodiments, antibodies may be prepared by immunizing a host with an antigen of interest. Host animals (e.g., mice, rabbits, goats, or llamas) may be immunized with an antigenic protein to elicit lymphocytes that specifically bind to the antigen. Lymphocytes may be collected and fused with immortalized cell lines to generate hybridomas which can be cultured in a suitable culture medium to promote growth (e.g., see Kohler, G. et al., Continuous cultures of fused cells secreting antibody of predefined specificity. Nature. 1975 Aug. 7; 256(5517):495-7, the contents of which are herein incorporated by reference in their entirety). Alternatively, lymphocytes may be immunized in vitro.

[1381] In some embodiments, antibodies of the present disclosure may be prepared through immunization using mouse host animals. Such host animals may include transgenic mice. Transgenic mice may include those engineered to express human antibody sequences, in some cases, replacing mouse antibody sequences. Transgenic mice may express human variable domain sequences and/or constant domain sequences. In some embodiments, mouse host animals used for immunization may include any of the transgenic mice described in U.S. Pat. Nos. 7,435,871, 7,547,817, 9,346,873, 9,580,491, or 10,555,506, the content of each of which is herein incorporated by reference in its entirety.

[1382] Lymphocytes may be fused with immortalized cell lines using suitable fusing agents (e.g., polyethylene glycol) to form a hybridoma cell (e.g., see Goding, J. W., Monoclonal Antibodies: Principles and Practice. Academic Press. 1986; 59-1031, the contents of which are herein incorporated by reference in their entirety). Immortalized cell lines may be transformed mammalian cells, particularly myeloma cells of rodent, rabbit, bovine, or human origin. In some embodiments, rat or mouse myeloma cell lines are employed. Hybridoma cells may be cultured in suitable culture media, typically including one or more substances that inhibit the growth or survival of unfused cells. For example, parental cells lacking the enzyme hypoxanthine guanine phosphoribosyl transferase (HGPRT or HPRT) may be used and culture media for resulting hybridoma cells may be supplemented with hypoxanthine, aminopterin, and thymidine (“HAT medium”) to prevent growth of HGPRT-deficient (unfused) cells.

[1383] Desirable properties for immortalized cell lines may include, but are not limited to, efficient fusing, supportive of high level antibody expression by selected antibody-producing cells, and sensitivity to unfused cell-inhibitory media (e.g., HAT media). In some embodiments, immortalized cell lines are murine myeloma lines. Such cell lines may be obtained, for example, from the Salk Institute Cell Distribution Center (San Diego, CA) or the American Type Culture Collection, (Manassas, VA). Human myeloma and mouse-human heteromyeloma cell lines may also be used for the production of human monoclonal antibodies (e.g., see Kozbor, D. et al., A human hybrid myeloma for production of human monoclonal antibodies. J Immunol. 1984 December; 133(6):3001-5 and Brodeur, B. et al., Monoclonal Antibody Production Techniques and Applications. Marcel Dekker, Inc., New York. 1987; 33:51-63, the contents of each of which are herein incorporated by reference in their entireties).

[1384] Hybridoma cell culture media may be assayed for the presence of monoclonal antibodies with desired binding specificity. Assays may include, but are not limited to, immunoprecipitation assay, in vitro binding assay, radioimmunoassay (RIA), surface plasmon resonance (SPR) assay, and/or enzyme-linked immunosorbent assay (ELISA). In some embodiments, binding specificity of monoclonal antibodies may be determined by Scatchard analysis (Munson, P. J. et al., Ligand: a versatile computerized approach for characterization of ligand-binding systems. Anal Biochem. 1980 Sep. 1; 107(1):220-39, the contents of which are herein incorporated by reference in their entirety).

[1385] Antibodies produced by cultured hybridomas may be analyzed to determine binding specificity for target antigens. Once antibodies with desirable characteristics are identified, corresponding hybridomas may be subcloned through limiting dilution procedures and grown by standard methods. Antibodies produced by hybridomas may be isolated and purified using standard immunoglobulin purification procedures such as, for example, protein A-Sepharose, hydroxyapatite chromatography, gel electrophoresis, dialysis, or affinity chromatography. Alternatively, hybridoma cells may be grown in vivo as ascites in a mammal. In some embodiments, antibodies may be isolated directly from serum of immunized hosts.

[1386] In some embodiments, recombinant versions of antibodies generated through immunization may be prepared. Such antibodies may be prepared using genomic antibody sequences from selected hybridomas. Hybridoma genomic antibody sequences may be obtained by extracting RNA molecules from antibody-producing hybridoma cells and producing cDNA by reverse transcriptase polymerase chain reaction (PCR). PCR may be used to amplify cDNA using primers specific for antibody heavy and light chains. PCR products may then be subcloned into plasmids for sequence analysis. Antibodies may be produced by insertion of resulting antibody sequences into expression vectors. Some recombinant antibodies may be prepared using synthetic nucleic acid constructs that encode amino acid sequences corresponding to amino acid sequences obtained from isolated hybridoma antibodies.

### Antibody Display

[1387] In some embodiments, antibodies may be developed using antibody display technologies. “Display technology” refers to systems and methods for expressing amino acid-based candidate compounds in a format where they are linked with nucleic acids encoding them and are accessible to a target or ligand. Candidate compounds are expressed at the surface of a host capsid or cell in most systems, however, some host-free systems (e.g., ribosomal display) exist. Display technologies may be used to generate display “libraries,” which include sets of candidate compound library members. Display libraries with antibodies (or variants or fragments thereof) as library members are referred to herein as “antibody display libraries.” Antibodies may be designed, selected, or optimized by screening target antigens using antibody display libraries. Antibody display libraries may include millions to billions of members, each expressing unique antibody domains. Antibody fragments displayed may be scFv antibody fragments, which are fusion proteins of V_{H} and V_{L} antibody domains joined by a flexible linker. Display libraries may include antibody fragments with differing levels of diversity between variable domain framework regions and CDRs. Display library antibody fragment CDRs may include unique variable loop lengths and/or sequences. Antibody variable domains or CDRs obtained from display library selection may be directly incorporated into antibody sequences for recombinant antibody production or mutated and utilized for further optimization through in vitro affinity maturation.

[1388] Antibody display libraries may include antibody phage display libraries. Antibody phage display libraries utilize phage virus particles as hosts with millions to billions of members, each expressing unique antibody domains. Such libraries may provide richly diverse sources that may be used to select potentially hundreds of antibody fragments with diverse levels of affinity for one or more antigens of interest (McCafferty, et al., 1990. Nature. 348:552-4; Edwards, B. M. et al., 2003. JMB. 334: 103-18; Schofield, D. et al., 2007. Genome Biol. 8, R254 and Pershad, K. et al., 2010. Protein Engineering Design and Selection. 23:279-88; the contents of each of which are herein incorporated by reference in their entirety). Antibody fragments displayed may be scFv antibody fragments. Phage display library members may be expressed as fusion proteins, linked to viral coat proteins (e.g. the N-terminus of the viral pIII coat protein). V_{L} chains may be expressed separately for assembly with V_{H} chains in the periplasm prior to complex incorporation into viral coats. Precipitated library members may be sequenced from the bound phage to obtain cDNA encoding desired antibody domains.

[1389] In some embodiments, antibody display libraries may be generated using yeast surface display technology. Antibody yeast display libraries are made up of yeast cells with surface displayed antibodies or antibody fragments. Antibody yeast display libraries may include antibody variable domains expressed on the surface of Saccharomyces cerevisiae cells. Yeast display libraries may be developed by displaying antibody fragments of interest as fusion proteins with yeast surface proteins (e.g. Aga2p protein). Yeast cells displaying antibodies or antibody fragments with affinity for a specific target may be isolated according to standard methods. Such methods may include, but are not limited to, magnetic separation and flow cytometry.

### Recombinant Synthesis

[1390] Antibodies of the present disclosure may be prepared using recombinant DNA technology and related processes. Constructs (e.g., DNA expression plasmids) encoding antibodies may be prepared and used to synthesize full antibodies or portions thereof. In some embodiments, DNA sequences encoding antibody variable domains of the present disclosure may be inserted into expression vectors (e.g., mammalian expression vectors) encoding other antibody domains and used to prepare antibodies with the inserted variable domains. DNA sequences encoding antibody variable domains may be inserted downstream of upstream expression vector regions with promoter/enhancer elements and/or encoding immunoglobulin signal sequences. DNA sequences encoding antibody variable domains may be inserted upstream of downstream expression vector regions encoding immunoglobulin constant domains. Encoded constant domains may be from any class (e.g., IgG, IgA, IgD, IgE, and IgM) or species (e.g., human, mouse, rabbit, rat, and non-human primate). In some embodiments, encoded constant domains encode human IgG (e.g., IgG1, IgG2a, IgG2b, IgG2c, IgG3, or IgG4) constant domains. In some embodiments, encoded constant domains encode mouse IgG (e.g., IgG1, IgG2a, IgG2b, or IgG3) constant domains.

[1391] Expression vectors encoding antibodies of the present disclosure may be used to transfect cells for antibody production. Such cells may be mammalian cells. Cell lines with stable transfection of antibody expression vectors may be prepared and used to establish stable cell lines. Cell lines producing antibodies may be expanded for expression of antibodies which may be isolated or purified from cell culture media.

### Anti-Tau Antibody Sequences

[1392] Described herein are antibodies, e.g., recombinant antibodies, which are characterized by particular functional and structural features or properties. For example, the antibodies specifically bind human tau (e.g., human tau having the sequence set forth in SEQ ID NO: 1404). Particular antibodies described herein are antibodies having the CDR and/or variable region (VH and/or VL) sequences of antibodies VY011, VY007, VY004, VY006, VY018, VY003, VY016, VY017, VY012, VY009, VY010, VY022, VY001, VY019, VY020, VY005, VY002, VY014, VY008, and VY013, as well as antibodies having at least 70%, 75%, 80%, 85%, 90%, 92%, 95%, 96%, 97%, 98%, or 99% sequence identity thereto, and antibodies having variable regions with at least one, two, or three modifications, but not more than 30, 20, or 10 modifications (e.g., 1-30, 1-20, 1-10, 1-5, 1-4, 1-3, 1-2, or 1 amino acid modification, such as amino acid substitutions (e.g., conservative substitutions)), relative to the VH and/or VL sequences of the VY antibodies listed above. The ability of variant antibodies to bind to tau (e.g., wild-type tau (e.g., SEQ ID NO: 1404), ePHF, iPHF) can be determined using art-recognized binding assays, e.g., the binding assays described in the Examples. Table 1 summarizes the amino acid sequences and nucleotide sequences encoding the VY antibodies.

TABLE 1
Exemplary anti-tau antibodies

| Ab ID | SEQ ID | Description | Sequence |
|---|---|---|---|
| VY011 | 82 | HCDR1 | GGSISNYY |
| | 97 | HCDR2 | VYTSGSA |
| | 115 | HCDR3 | ARDRGLYY |
| | 1305 | FR H1 | QVQLQESGPGLVKPSETLSLTCTVS |
| | 1313 | FR H2 | WTWIRQPAGKGLEWIGR |
| | 1327 | FR H3 | NYNPSLKSRVTMSVDTSKNQFSLTLSSVTAADTAVYYC |
| | 1339 | FR H4 | WGQGTLVTVSS |
| | 127 | LCDR1 | QSLVHSDGNTY |
| | | LCDR2 | KIS |
| | 1289 | LCDR3 | MQATQFPLT |
| | 1349 | FR L1 | DIVMTQTPLSSLVTLGQPASISCRSS |
| | 1360 | FR L2 | LSWLQQRPGQPPRLLIY |
| | 1380 | FR L3 | KRFFGVPDRFSGSGAGTDFTLKINRVEAEDVGIYYC |
| | 1395 | FR L4 | FGGGTKVEIK |
| | 1143 | VH | QVQLQESGPGLVKPSETLSLTCTVSGGSISNYYWTWIRQPAGKGLEWIG |
| | | | RVYTSGSANYNPSLKSRVTMSVDTSKNQFSLTLSSVTAADTAVYYCARD |
| | | | RGLYYWGQGTLVTVSS |
| | 25 | VL | DIVMTQTPLSSLVTLGQPASISCRSSQSLVHSDGNTYLSWLQQRPGQPP |
| | | | RLLIYKISKRFFGVPDRFSGSGAGTDFTLKINRVEAEDVGIYYCMQATQ |
| | | | FPLTFGGGTKVEIK |
| | 51 | VH (DNA) | CAGGTGCAGCTGCAGGAGTCGGGCCCAGGACTGGTGAAGCCTTCGGAGA |
| | | | CCCTGTCCCTCACCTGCACTGTCTCTGGTGGCTCCATCAGTAATTACTA |
| | | | CTGGACCTGGATCCGGCAGCCCGCCGGGAAGGGACTGGAGTGGATTGGG |
| | | | CGTGTCTATACCAGTGGGAGCGCCAACTACAACCCCTCCCTCAAGAGTC |
| | | | GAGTTACCATGTCAGTAGACACGTCCAAGAACCAGTTCTCCCTGACGCT |
| | | | GAGCTCTGTGACCGCCGCGGACACGGCCGTGTATTACTGTGCGAGAGAT |
| | | | AGAGGACTCTACTACTGGGGCCAGGGAACCCTGGTCACCGTCTCCTCA |
| | 71 | VL (DNA) | GATATTGTGATGACCCAGACTCCACTCTCCTCACTTGTCACCCTTGGAC |
| | | | AGCCGGCCTCCATCTCCTGCAGGTCTAGTCAAAGCCTCGTACACAGTGA |
| | | | TGGAAACACCTATTTGAGTTGGCTTCAGCAGAGGCCAGGCCAGCCTCCA |
| | | | AGACTCCTAATTTATAAGATTTCTAAGCGGTTCTTTGGGGTCCCAGACA |
| | | | GATTCAGTGGCAGTGGGGCAGGGACAGATTTCACACTGAAAATCAACAG |
| | | | GGTGGAAGCTGAGGATGTCGGGATTTATTACTGCATGCAAGCTACACAA |
| | | | TTTCCGCTCACTTTCGGCGGAGGGACCAAGGTGGAGATCAAA |
| VY007 | 79 | HCDR1 | RFTFSNYN |
| | 94 | HCDR2 | ISSSSSTI |
| | 111 | HCDR3 | ASLGRGY |
| | 1303 | FR H1 | [sequence omitted] |
| | 1312 | FR H2 | MNWVRQAPGKGLEWISY |
| | 1324 | FR H3 | YYADSVKGRFTISRDNAKNSLSLQMNSLRDEDTAVYYC |
| | 1339 | FR H4 | WGQGTLVTVSS |
| | 127 | LCDR1 | QSLVHSDGNTY |
| | | LCDR2 | KIS |
| | 1286 | LCDR3 | MQATQFPRT |
| | 1345 | FR L1 | DIVMTQTPLSSPVTLGQPASISCRSS |
| | 1360 | FR L2 | LSWLQQRPGQPPRLLIY |
| | 1376 | FR L3 | NRFSGVPDRFSGSGAGTDFTLKISRVEAEDVGVYYC |
| | 1394 | FR L4 | FGQGSKLEIK |
| | 3 | VH | EVQLVESGGGLVQPGGSLRLSCAASRFTFSNYNMNWVRQAPGKGLEWIS |
| | | | YISSSSSTIYYADSVKGRFTISRDNAKNSLSLQMNSLRDEDTAVYYCAS |
| | | | LGRGYWGQGTLVTVSS |
| | 21 | VL | DIVMTQTPLSSPVTLGQPASISCRSSQSLVHSDGNTYLSWLQQRPGQPP |
| | | | RLLIYKISNRFSGVPDRFSGSGAGTDFTLKISRVEAEDVGVYYCMQATQ |
| | | | FPRTFGQGSKLEIK |
| | 55 | VH (DNA) | GAGGTGCAGCTGGTGGAGTCTGGGGGAGGCTTGGTACAGCCTGGGGGGT |
| | | | CCCTGAGACTCTCCTGTGCAGCCTCTAGATTCACCTTCAGTAACTATAA |
| | | | CATGAACTGGGTCCGCCAGGCTCCAGGGAAGGGGCTGGAGTGGATTTCA |
| | | | TACATTAGTAGTAGTAGTAGTACCATATACTACGCAGACTCTGTGAAGG |
| | | | GCCGATTCACCATCTCCAGAGACAATGCCAAGAACTCACTGTCTCTGCA |
| | | | AATGAACAGCCTGAGAGACGAGGACACGGCTGTGTATTACTGTGCGAGT |
| | | | CTGGGGAGGGGCTACTGGGGCCAGGGAACCCTGGTCACCGTCTCCTCA |
| | 75 | VL (DNA) | GATATTGTGATGACCCAGACTCCACTCTCCTCACCTGTCACCCTTGGAC |
| | | | AGCCGGCCTCCATCTCCTGCAGGTCTAGTCAAAGCCTCGTACACAGTGA |
| | | | TGGAAACACCIACTTGAGTTGGCTTCAGCAGAGGCCAGGCCAGCCTCCA |
| | | | AGACTCCTAATTTATAAGATTTCTAACCGGTTCTCTGGGGTCCCAGACA |
| | | | GATTCAGTGGCAGTGGGGCAGGGACAGATTTCACACTGAAAATCAGCAG |
| | | | GGTGGAAGCTGAGGATGTCGGGGTTTATTATTGTATGCAAGCTACTCAA |
| | | | TTTCCTCGCACTTTTGGCCAGGGGTCCAAGCTGGAGATCAAA |
| VY004 | 80 | HCDR1 | GFTFSDYS |
| | 95 | HCDR2 | IRSSSSII |
| | 112 | HCDR3 | ARRGHFDY |
| | 1304 | FR H1 | EVQLVESGGGLVQAGGSLRLSCAAS |
| | 1311 | FR H2 | MNWVRQAPGKGLEWVSY |
| | 1325 | FR H3 | YYADSVKGRFTISRDNAKNSLHLQMNSLRDEDTAVYYC |
| | 1339 | FR H4 | WGQGTLVTVSS |
| | 129 | LCDR1 | QSVSDY |
| | | LCDR2 | DVS |
| | 1287 | LCDR3 | QQRSNWPLT |
| | 1347 | FR L1 | [sequence omitted] |
| | 1362 | FR L2 | LAWYQQKPGQAPRLFIY |
| | 1377 | FR L3 | KRATGIPARFSGSGSGTDFTLTISSLEPEDFAVYYC |
| | 1395 | FR L4 | FGGGTKVEIK |
| | 1140 | VH | EVQLVESGGGLVQAGGSLRLSCAASGFTFSDYSMNWVRQAPGKGLEWVS |
| | | | YIRSSSSIIYYADSVKGRFTISRDNAKNSLHLQMNSLRDEDTAVYYCAR |
| | | | RGHFDYWGQGTLVTVSS |
| | 22 | VL | EIVLTQSPATLSLSPGERATLSCRASQSVSDYLAWYQQKPGQAPRLFIY |
| | | | DVSKRATGIPARFSGSGSGTDFTLTISSLEPEDFAVYYCQQRSNWPLTF |
| | | | GGGTKVEIK |
| | 54 | VH (DNA) | GAGGTGCAGCTGGTGGAGTCTGGGGGAGGCTTGGTACAGGCTGGGGGGT |
| | | | CCCTGAGACTCTCCTGTGCAGCCTCTGGATTCACCTTCAGTGACTATAG |
| | | | CATGAACTGGGTCCGCCAGGCTCCAGGGAAGGGGCTGGAGTGGGTTTCA |
| | | | TATATTAGGAGTAGTAGTAGTATCATATACTACGCAGACTCTGTGAAGG |
| | | | GCCGATTCACCATCTCCAGAGACAATGCCAAGAACTCACTGCATTTGCA |
| | | | AATGAACAGCCTGAGAGACGAGGACACGGCTGTGTATTACTGTGCGAGA |
| | | | CGGGGTCACTTTGACTACTGGGGCCAGGGAACCCTGGTCACCGTCTCCT |
| | | | CA |
| | 74 | VL (DNA) | GAAATTGTGTTGACACAGTCTCCAGCCACCCTGTCTTTGTCTCCAGGGG |
| | | | AAAGAGCCACCCTCTCCTGCAGGGCCAGTCAGAGTGTTAGCGACTACTT |
| | | | AGCCTGGTACCAACAGAAACCTGGCCAGGCTCCCAGGCTCTTCATCTAT |
| | | | GATGTATCCAAGAGGGCCACTGGCATCCCAGCCAGGTTCAGTGGCAGTG |
| | | | GGTCTGGGACAGACTTCACTCTCACCATCAGCAGCCTAGAGCCTGAAGA |
| | | | TTTTGCAGTTTATTACTGTCAGCAGCGTAGCAACTGGCCGCTCACTTTC |
| | | | GGCGGAGGGACCAAGGTGGAGATCAAA |
| VY006 | 81 | HCDR1 | GFTFSSYT |
| | 94 | HCDR2 | ISSSSSTI |
| | 114 | HCDR3 | ASLGRGDC |
| | 1303 | FR H1 | [sequence omitted] |
| | 1311 | FR H2 | MNWVRQAPGKGLEWVSY |
| | 1322 | FR H3 | YYADSVKGRFTISRDNAKNSLYLQMNSLRDEDTAVYYC |
| | 1339 | FR H4 | WGQGTLVTVSS |
| | 127 | LCDR1 | QSLVHSDGNTY |
| | | LCDR2 | KIS |
| | 1286 | LCDR3 | MQATQFPRT |
| | 1345 | FR L1 | DIVMTQTPLSSPVTLGQPASISCRSS |
| | 1360 | FR L2 | LSWLQQRPGQPPRLLIY |
| | 1379 | FR L3 | KRFSGVPDRFSGSGAGTDFTLKISRVEAEDVGVYYC |
| | 1397 | FR L4 | FGQGTRLEIK |
| | 1142 | VH | EVQLVESGGGLVQPGGSLRLSCAASGFTFSSYTMNWVRQAPGKGLEWVS |
| | | | YISSSSSTIYYADSVKGRFTISRDNAKNSLYLQMNSLRDEDTAVYYCAS |
| | | | LGRGDCWGQGTLVTVSS |
| | 24 | VL | DIVMTQTPLSSPVTLGQPASISCRSSQSLVHSDGNTYLSWLQQRPGQPP |
| | | | RLLIYKISKRFSGVPDRFSGSGAGTDFTLKISRVEAEDVGVYYCMQATQ |
| | | | FPRTFGQGTRLEIK |
| | 52 | VH (DNA) | GAGGTGCAGCTGGTGGAGTCTGGGGGAGGCTTGGTACAGCCTGGGGGGT |
| | | | CCCTGAGACTCTCCTGTGCAGCCTCTGGATTCACCTTCAGTAGTTATAC |
| | | | CATGAACTGGGTCCGCCAGGCTCCAGGGAAGGGGCTGGAGTGGGTTTCA |
| | | | TACATTAGTAGTAGTAGTAGTACCATATACTACGCAGACTCTGTGAAGG |
| | | | GCCGATTCACCATCTCCAGAGACAATGCCAAGAACTCACTGTATCTGCA |
| | | | AATGAACAGCCTGAGAGACGAGGACACGGCTGTGTATTACTGTGCGAGT |
| | | | CTGGGGAGAGGGGACTGCTGGGGCCAGGGAACCCTGGTCACCGTCTCCT |
| | | | CA |
| | 72 | VL (DNA) | GATATTGTGATGACCCAGACTCCACTCTCCTCACCTGTCACCCTTGGAC |
| | | | AGCCGGCCTCCATCTCCTGCAGGTCTAGTCAAAGCCTCGTACACAGTGA |
| | | | TGGAAACACCTACTTGAGTTGGCTTCAGCAGAGGCCAGGCCAGCCTCCA |
| | | | AGACTCCTAATTTATAAGATTTCTAAACGGTTCTCTGGGGTCCCAGACA |
| | | | GATTCAGTGGCAGTGGGGCAGGGACAGATTTCACACTGAAAATCAGCAG |
| | | | GGTGGAAGCTGAGGATGTCGGGGTTTATTACTGCATGCAAGCTACACAA |
| | | | TTTCCTCGGACCTTCGGCCAAGGGACACGACTGGAGATTAAA |
| VY018 | 82 | HCDR1 | GGSISNYY |
| | 101 | HCDR2 | IYTSGDT |
| | 119 | HCDR3 | ARAGIVGTPGLGMDV |
| | 1305 | FR H1 | QVQLQESGPGLVKPSETLSLTCTVS |
| | 1317 | FR H2 | WSWIRQPAGKGLEWIGR |
| | 1331 | FR H3 | YYNPSLQSRVTMSVDTSKNQFSLKLSAVTAADTAVYYC |
| | 1341 | FR H4 | WGQGTTVTVSS |
| | 132 | LCDR1 | ALPKQY |
| | | LCDR2 | KDS |
| | 1294 | LCDR3 | QSADSSGTYRV |
| | 1354 | FR L1 | SYELTQPPSVSVSPGQTARITCSGE |
| | 1368 | FR L2 | AYWYQQKPGQAPVLVIY |
| | 1382 | FR L3 | ERPSGIPERFSGSSSGTTVTLTISGVQAEDEADYYC |
| | 1393 | FR L4 | FGGGTKLTVL |
| | 11 | VH | QVQLQESGPGLVKPSETLSLTCTVSGGSISNYYWSWIRQPAGKGLEWIG |
| | | | RIYTSGDTYYNPSLQSRVTMSVDTSKNQFSLKLSAVTAADTAVYYCARA |
| | | | GIVGTPGLGMDVWGQGTTVTVSS |
| | 30 | VL | SYELTQPPSVSVSPGQTARITCSGEALPKQYAYWYQQKPGQAPVLVIYK |
| | | | DSERPSGIPERFSGSSSGTTVTLTISGVQAEDEADYYCQSADSSGTYRV |
| | | | FGGGTKLTVL |
| | 47 | VH (DNA) | CAGGTGCAGCTGCAGGAGTCGGGCCCAGGACTGGTGAAGCCTTCGGAGA |
| | | | CCCTGTCCCTCACCTGCACTGTCTCTGGTGGCTCCATCAGTAATTACTA |
| | | | CTGGAGTTGGATCCGGCAGCCCGCCGGGAAGGGTCTGGAGTGGATTGGG |
| | | | CGTATCTATACCAGTGGGGACACCTACTACAACCCCTCCCTCCAGAGTC |
| | | | GAGTCACCATGTCAGTAGACACGTCCAAGAACCAGTTCTCCCTGAAGCT |
| | | | GAGCGCTGTGACCGCCGCGGACACGGCCGTCTATTACTGTGCGAGAGCG |
| | | | GGTATAGTGGGAACTCCGGGACTCGGTATGGACGTCTGGGGCCAAGGGA |
| | | | CCACGGTCACCGTCTCCTCA |
| | 66 | VL (DNA) | TCCTATGAGCTGACACAGCCACCCTCGGTGTCAGTGTCCCCAGGACAGA |
| | | | CGGCCAGGATCACCTGCTCTGGAGAAGCATTGCCAAAGCAATATGCTTA |
| | | | TTGGTACCAGCAGAAGCCAGGCCAGGCCCCTGTGCTGGTGATATATAAA |
| | | | GACAGTGAGAGGCCCTCAGGGATCCCTGAGCGATTCTCTGGCTCCAGCT |
| | | | CAGGGACAACAGTCACGTTGACCATCAGTGGAGTCCAGGCAGAAGATGA |
| | | | GGCTGACTATTACTGTCAATCAGCAGACAGCAGTGGTACTTATCGGGTG |
| | | | TTCGGCGGAGGGACCAAGCTGACCGTCCTA |
| VY003 | 77 | HCDR1 | GFTFSSYR |
| | 92 | HCDR2 | ISSSRSAI |
| | 109 | HCDR3 | ATLGIGY |
| | 1302 | FR H1 | EVQMVESGGGLVQPGGSLTLSCAAS |
| | 1311 | FR H2 | MNWVRQAPGKGLEWVSY |
| | 1322 | FR H3 | YYADSVKGRFTISRDNAKNSLYLQMNSLRDEDTAVYYC |
| | 1339 | FR H4 | WGQGTLVTVSS |
| | 127 | LCDR1 | QSLVHSDGNTY |
| | | LCDR2 | KIS |
| | 1284 | LCDR3 | MQVTQFPRT |
| | 1345 | FR L1 | DIVMTQTPLSSPVTLGQPASISCRSS |
| | 1360 | FR L2 | LSWLQQRPGQPPRLLIY |
| | 1374 | FR L3 | NRFSGVPDRFSGSGAGTDFTLKITRVEAEDVGIYYC |
| | 1392 | FR L4 | FGQGTKVEIR |
| | 1 | VH | EVQMVESGGGLVQPGGSLTLSCAASGFTFSSYRMNWVRQAPGKGLEWVS |
| | | | YISSSRSAIYYADSVKGRFTISRDNAKNSLYLQMNSLRDEDTAVYYCAT |
| | | | LGIGYWGQGTLVTVSS |
| | 19 | VL | DIVMTQTPLSSPVTLGQPASISCRSSQSLVHSDGNTYLSWLQQRPGQPP |
| | | | RLLIYKISNRFSGVPDRFSGSGAGTDFTLKITRVEAEDVGIYYCMQVTQ |
| | | | FPRTFGQGTKVEIR |
| | 39 | VH (DNA) | GAGGTGCAGATGGTGGAGTCTGGGGGAGGCTTGGTACAGCCTGGGGGGT |
| | | | CCCTGACACTCTCCTGTGCAGCCTCTGGATTCACCTTCAGTAGCTATAG |
| | | | AATGAACTGGGTCCGCCAGGCTCCAGGGAAGGGGCTGGAGTGGGTTTCA |
| | | | TACATTAGCAGTAGTAGAAGTGCCATATACTACGCAGACTCTGTGAAGG |
| | | | GCCGATTCACCATCTCCAGAGACAATGCCAAGAACTCACTGTATCTGCA |
| | | | AATGAACAGCCTGAGAGACGAGGACACGGCTGTGTATTACTGTGCGACC |
| | | | CTGGGGATAGGCTACTGGGGCCAGGGAACCCTGGTCACCGTCTCCTCA |
| | 57 | VL (DNA) | GATATTGTGATGACCCAGACTCCACTCTCCTCACCTGTCACCCTTGGAC |
| | | | AGCCGGCCTCCATCTCCTGCAGGTCTAGTCAAAGCCTCGTACACAGTGA |
| | | | TGGAAACACCTACTTGAGTTGGCTTCAGCAGAGGCCAGGCCAGCCTCCA |
| | | | AGACTCCTAATTTATAAGATTTCTAACCGGTTCTCTGGGGTCCCAGACA |
| | | | GATTCAGTGGCAGTGGGGCAGGGACAGATTTCACACTGAAAATCACCAG |
| | | | GGTGGAGGCTGAGGATGTCGGGATTTATTACTGCATGCAAGTTACACAA |
| | | | TTTCCTCGGACGTTCGGCCAAGGGACCAAGGTGGAAATCAGA |
| VY016 | 78 | HCDR1 | GFTFSSYS |
| | 93 | HCDR2 | ISRSGSTI |
| | 110 | HCDR3 | ARGNWAY |
| | 1303 | FR H1 | [sequence omitted] |
| | 1311 | FR H2 | MNWVRQAPGKGLEWVSY |
| | 1323 | FR H3 | YYADSVEGRFTISRDNAYNSLYLQMISLRDDDTAVYYC |
| | 1340 | FR H4 | WGQGILVTVSS |
| | 128 | LCDR1 | SSNIGAGYD |
| | | LCDR2 | GNS |
| | 1285 | LCDR3 | QSYDSSLSGSV |
| | 1346 | FR L1 | QSVLTQPPSVSGAPGQRVTISCTGS |
| | 1361 | FR L2 | VHWYQQLPGTAPKLLIY |
| | 1375 | FR L3 | NRPSGVPDRFSGSKSGTSASLAITGLQAEDETDFYC |
| | 1393 | FR L4 | FGGGTKLTVL |
| | 2 | VH | EVQLVESGGGLVQPGGSLRLSCAASGFTFSSYSMNWVRQAPGKGLEWVS |
| | | | YISRSGSTIYYADSVEGRFTISRDNAYNSLYLQMISLRDDDTAVYYCAR |
| | | | GNWAYWGQGILVTVSS |
| | 20 | VL | QSVLTQPPSVSGAPGQRVTISCTGSSSNIGAGYDVHWYQQLPGTAPKLL |
| | | | IYGNSNRPSGVPDRFSGSKSGTSASLAITGLQAEDETDFYCQSYDSSLS |
| | | | GSVFGGGTKLTVL |
| | 56 | VH (DNA) | GAGGTGCAGCTGGTGGAGTCTGGGGGAGGCTTGGTACAGCCTGGGGGGT |
| | | | CCCTGAGACTCTCCTGTGCAGCCTCTGGATTCACCTTCAGTAGCTATAG |
| | | | CATGAACTGGGTCCGCCAGGCTCCAGGGAAGGGGCTGGAGTGGGTTTCA |
| | | | TACATTAGTCGTAGTGGTAGTACCATATACTACGCAGACTCTGTGGAGG |
| | | | GCCGATTCACCATCTCCAGAGACAATGCCTACAACTCACTGTATCTGCA |
| | | | AATGATCAGCCTGAGAGACGATGACACGGCTGTGTATTACTGTGCGAGA |
| | | | GGGAACTGGGCCTACTGGGGCCAGGGAATCCTGGTCACCGTCTCCTCA |
| | 76 | VL (DNA) | CAGTCTGTGCTGACGCAGCCGCCCTCAGTGTCTGGGGCCCCAGGGCAGA |
| | | | GGGTCACCATCTCCTGCACTGGGAGCAGCTCCAACATCGGGGCAGGTTA |
| | | | TGATGTACACTGGTACCAGCAGCTTCCAGGAACAGCCCCCAAACTCCTC |
| | | | ATCTATGGTAACAGCAATCGGCCCTCAGGGGTCCCTGACCGATTCTCTG |
| | | | GCTCCAAGTCTGGCACCTCAGCCTCCCTGGCCATCACTGGGCTCCAGGC |
| | | | TGAGGATGAGACTGATTTTTACTGCCAGTCCTATGACAGCAGCCTGAGT |
| | | | GGTTCGGTTTTCGGCGGAGGGACCAAGCTGACCGTCCTG |
| VY017 | 78 | HCDR1 | GFTFSSYS |
| | 96 | HCDR2 | IRSSSSTI |
| | 113 | HCDR3 | ARRSIADY |
| | 1303 | FR H1 | [sequence omitted] |
| | 1311 | FR H2 | MNWVRQAPGKGLEWVSY |
| | 1326 | FR H3 | YYADSVKGRFTISRDNAKKSLYLQMNSLRDEDTAVYYC |
| | 1339 | FR H4 | WGQGTLVTVSS |
| | 130 | LCDR1 | QSVTSY |
| | | LCDR2 | DAS |
| | 1288 | LCDR3 | QQRSNWPYT |
| | 1348 | FR L1 | EIVLTQSPATLSSSPGERATLSCRAS |
| | 1363 | FR L2 | LNWYQQKPGQAPRLLIY |
| | 1378 | FR L3 | NRATGIPARFSGSGSGTDFTLTISSLEPEDFALYYC |
| | 1396 | FR L4 | FGQGTKLEIK |
| | 1141 | VH | EVQLVESGGGLVQPGGSLRLSCAASGFTFSSYSMNWVRQAPGKGLEWVS |
| | | | YIRSSSSTIYYADSVKGRFTISRDNAKKSLYLQMNSLRDEDTAVYYCAR |
| | | | RSIADYWGQGTLVTVSS |
| | 23 | VL | EIVLTQSPATLSSSPGERATLSCRASQSVTSYLNWYQQKPGQAPRLLIY |
| | | | DASNRATGIPARFSGSGSGTDFTLTISSLEPEDFALYYCQQRSNWPYTF |
| | | | GQGTKLEIK |
| | 41 | VH (DNA) | GAGGTGCAGTTGGTGGAGTCTGGGGGAGGCTTGGTACAGCCTGGGGGGT |
| | | | CCCTGAGACTCTCCTGTGCAGCCTCTGGATTCACCTTCAGTAGCTATAG |
| | | | CATGAACTGGGTCCGCCAGGCTCCAGGGAAGGGGCTGGAGTGGGTTTCA |
| | | | TACATTAGGAGTAGTAGTAGTACCATATACTACGCAGACTCTGTGAAGG |
| | | | GCCGATTCACCATCTCCAGAGACAATGCCAAGAAATCATTGTATCTGCA |
| | | | AATGAATAGTCTGAGAGACGAGGACACGGCTGTGTATTACTGTGCGAGA |
| | | | AGGAGTATAGCTGACTACTGGGGCCAGGGAACCCTGGTCACCGTCTCCT |
| | | | CA |
| | 59 | VL (DNA) | GAAATTGTGTTGACACAGTCTCCAGCCACCCTGTCTTCGTCTCCAGGGG |
| | | | AAAGAGCCACCCTCTCCTGCAGGGCCAGTCAGAGTGTTACCAGCTACTT |
| | | | AAACTGGTACCAACAGAAACCTGGCCAGGCTCCCAGGCTCCTCATCTAT |
| | | | GATGCATCCAACAGGGCCACTGGCATCCCAGCCAGGTTCAGTGGCAGTG |
| | | | GGTCTGGGACAGACTTCACTCTCACCATCAGCAGCCTCGAGCCTGAAGA |
| | | | TTTTGCACTTTATTACTGTCAGCAGCGTAGCAACTGGCCGTACACTTTT |
| | | | GGCCAGGGGACCAAACTGGAGATCAAA |
| VY012 | 83 | HCDR1 | GFTYSSYA |
| | 98 | HCDR2 | ISGSSSIT |
| | 116 | HCDR3 | AKGGRYGYFQH |
| | 1306 | FR H1 | EVQLLESGGGLVQPGGSLRLSCAAS |
| | 1314 | FR H2 | MSWVRRAPGKGLEWISI |
| | 1328 | FR H3 | YYADSMKGRFTISRDNSKNTLFLQMNSLRAEDTAVYYC |
| | 1339 | FR H4 | WGQGTLVTVSS |
| | 131 | LCDR1 | NIGSKS |
| | | LCDR2 | DDS |
| | 1290 | LCDR3 | QVWDSSSDPVV |
| | 1350 | FR L1 | SYVLTQPPSVSVAPGQTARITCGGN |
| | 1364 | FR L2 | VHWYQQKPGQAPVLVVY |
| | 1381 | FR L3 | DRPSGIPERFSGSNSGNTATLTISRVEAGDEADYYC |
| | 1398 | FR L4 | FGGGTMLTVL |
| | 1144 | VH | EVQLLESGGGLVQPGGSLRLSCAASGFTYSSYAMSWVRRAPGKGLEWIS |
| | | | IISGSSSITYYADSMKGRFTISRDNSKNTLFLQMNSLRAEDTAVYYCAK |
| | | | GGRYGYFQHWGQGTLVTVSS |
| | 26 | VL | SYVLTQPPSVSVAPGQTARITCGGNNIGSKSVHWYQQKPGQAPVLVVYD |
| | | | DSDRPSGIPERFSGSNSGNTATLTISRVEAGDEADYYCQVWDSSSDPVV |
| | | | FGGGTMLTVL |
| | 50 | VH (DNA) | GAGGTGCAGCTGTTGGAGTCTGGGGGAGGCTTGGTACAGCCGGGGGGGT |
| | | | CCCTGAGACTCTCCTGTGCAGCCTCGGGATTCACCTATAGCAGCTATGC |
| | | | CATGAGCTGGGTCCGCCGGGCTCCAGGGAAGGGGCTGGAGTGGATCTCA |
| | | | ATTATTAGTGGTAGTAGTAGTATCACATACTACGCAGACTCCATGAAGG |
| | | | GCCGGTTCACTATCTCTAGAGACAATTCCAAGAACACGCTTTTTCTGCA |
| | | | AATGAATAGCCTGAGAGCCGAGGACACGGCCGTTTATTACTGTGCGAAG |
| | | | GGGGGGAGGTACGGGTACTTCCAACACTGGGGCCAGGGCACCCTGGTCA |
| | | | CCGTCTCCTCA |
| | 70 | VL (DNA) | TCCTATGTGCTGACTCAGCCACCCTCGGTGTCAGTGGCCCCAGGACAGA |
| | | | CGGCCAGGATTACCTGTGGGGGAAACAACATTGGAAGTAAAAGTGTGCA |
| | | | CTGGTACCAGCAGAAGCCAGGCCAGGCCCCTGTGCTGGTCGTCTATGAT |
| | | | GATAGCGACCGGCCCTCAGGGATCCCTGAGCGATTCTCTGGCTCCAACT |
| | | | CTGGGAACACGGCCACCCTGACCATCAGCAGGGTCGAAGCCGGGGATGA |
| | | | GGCCGACTATTACTGTCAGGTGTGGGATAGTAGTAGTGATCCTGTGGTA |
| | | | TTCGGCGGAGGGACCATGCTGACCGTCCTA |
| VY009 | 84 | HCDR1 | GFSLSTSEVG |
| | 99 | HCDR2 | IYWNDHK |
| | 117 | HCDR3 | ARRVTGEGFDP |
| | 1307 | FR H1 | QITLKESGPTLVKPTQTLTLTCTLS |
| | 1315 | FR H2 | VGWIRQPPGKALEWLAI |
| | 1329 | FR H3 | RYSPSLKNRLTFTKDTSKNQVVLTMTNMDPVDTATYYC |
| | 1339 | FR H4 | WGQGTLVTVSS |
| | 132 | LCDR1 | ALPKQY |
| | | LCDR2 | KDT |
| | 1291 | LCDR3 | QSADSSGSYV |
| | 1351 | FR L1 | SYELTQPPSVSVSPGQTARITCSGD |
| | 1365 | FR L2 | AYWYQQKPGQAPVLVIF |
| | 1382 | FR L3 | ERPSGIPERFSGSSSGTTVTLTISGVQAEDEADYYC |
| | 1399 | FR L4 | FGTGTKVTVL |
| | 1145 | VH | QITLKESGPTLVKPTQTLTLTCTLSGFSLSTSEVGVGWIRQPPGKALEW |
| | | | LAIIYWNDHKRYSPSLKNRLTFTKDTSKNQVVLTMTNMDPVDTATYYCA |
| | | | RRVTGEGFDPWGQGTLVTVSS |
| | 27 | VL | SYELTQPPSVSVSPGQTARITCSGDALPKQYAYWYQQKPGQAPVLVIFK |
| | | | DTERPSGIPERFSGSSSGTTVTLTISGVQAEDEADYYCQSADSSGSYVF |
| | | | GTGTKVTVL |
| | 49 | VH (DNA) | CAGATCACCTTAAAGGAGTCTGGTCCTACGCTGGTGAAACCCACACAGA |
| | | | CCCTCACGCTGACCTGCACCCTCTCTGGGTTCTCACTCAGCACTAGTGA |
| | | | AGTGGGTGTGGGCTGGATCCGTCAGCCCCCAGGAAAGGCCCTGGAGTGG |
| | | | CTTGCAATCATTTATTGGAATGATCATAAGCGCTACAGCCCATCTCTGA |
| | | | AGAACAGGCTCACCTTCACCAAGGACACCTCCAAAAACCAGGTGGTCCT |
| | | | TACAATGACCAACATGGACCCTGTGGACACAGCCACATATTATTGTGCA |
| | | | CGCAGAGTAACTGGGGAGGGGTTCGACCCCTGGGGCCAGGGAACCCTGG |
| | | | TCACCGTCTCCTCA |
| | 69 | VL (DNA) | TCCTATGAGCTGACACAGCCACCCTCGGTGTCAGTGTCCCCAGGACAGA |
| | | | CGGCCAGGATCACCTGCTCTGGAGATGCATTGCCAAAGCAATATGCTTA |
| | | | TTGGTACCAGCAGAAGCCAGGCCAGGCCCCTGTGCTGGTGATATTTAAA |
| | | | GACACTGAGAGGCCCTCAGGGATCCCTGAGCGATTCTCTGGCTCCAGCT |
| | | | CAGGGACAACAGTCACGTTGACCATCAGTGGAGTCCAGGCAGAAGATGA |
| | | | GGCTGACTATTACTGTCAATCAGCAGACAGCAGTGGTTCTTATGTCTTC |
| | | | GGAACTGGGACCAAGGTCACCGTCCTA |
| VY010 | 85 | HCDR1 | GFTFSTYS |
| | 100 | HCDR2 | ISSGSSYI |
| | 118 | HCDR3 | TVTTHFHH |
| | 1308 | FR H1 | EVQLVESGGGLVKPGGSLRLSCAAS |
| | 1316 | FR H2 | MNWVRQAPGKGLEWVSS |
| | 1330 | FR H3 | YYADSVKGRFTISRDNAKNSLYLQMNSLRAEDTAVYYC |
| | 1339 | FR H4 | WGQGTLVTVSS |
| | 133 | LCDR1 | QSLVYSDGNTY |
| | | LCDR2 | KVS |
| | 1292 | LCDR3 | MQGTHWPLT |
| | 1352 | FR L1 | DVVMTQSPLSLPVTLGQPASISCRSS |
| | 1366 | FR L2 | LNWFQQRPGQSPRRLIY |
| | 1383 | FR L3 | NRDSGVPDRFSGSGSGTDFTLKISRVEAEDVGVYYC |
| | 1397 | FR L4 | FGQGTRLEIK |
| | 10 | VH | EVQLVESGGGLVKPGGSLRLSCAASGFTFSTYSMNWVRQAPGKGLEWVS |
| | | | SISSGSSYIYYADSVKGRFTISRDNAKNSLYLQMNSLRAEDTAVYYCTV |
| | | | TTHFHHWGQGTLVTVSS |
| | 28 | VL | DVVMTQSPLSLPVTLGQPASISCRSSQSLVYSDGNTYLNWFQQRPGQSP |
| | | | RRLIYKVSNRDSGVPDRFSGSGSGTDFTLKISRVEAEDVGVYYCMQGTH |
| | | | WPLTFGQGTRLEIK |
| | 48 | VH (DNA) | GAGGTGCAGCTGGTGGAGTCTGGGGGAGGCCTGGTCAAGCCTGGGGGGT |
| | | | CCCTGAGACTCTCCTGTGCAGCCTCTGGATTCACCTTCAGTACCTATAG |
| | | | CATGAACTGGGTCCGCCAGGCTCCAGGGAAGGGGCTGGAGTGGGTCTCA |
| | | | TCCATTAGTAGTGGTAGTAGTTACATATACTACGCAGACTCAGTGAAGG |
| | | | GCCGATTCACCATCTCCAGAGACAACGCCAAGAACTCACTGTATCTGCA |
| | | | AATGAACAGCCTGAGAGCCGAGGACACGGCTGTGTATTACTGTACAGTA |
| | | | ACTACACACTTCCACCACTGGGGCCAGGGCACCCTGGTCACCGTCTCCT |
| | | | CA |
| | 67 | VL (DNA) | GATGTTGTGATGACTCAGTCTCCACTCTCCCTGCCCGTCACCCTTGGAC |
| | | | AGCCGGCCTCCATCTCCTGCAGGTCTAGTCAAAGCCTCGTATACAGTGA |
| | | | TGGAAACACCTACTTGAATTGGTTTCAGCAGAGGCCAGGCCAATCTCCA |
| | | | AGGCGCCTAATTTATAAGGTTTCTAACCGGGACTCTGGGGTCCCAGACA |
| | | | GATTCAGCGGCAGTGGGTCAGGCACTGATTTCACACTAAAAATCAGCAG |
| | | | GGTGGAGGCTGAGGATGTTGGGGTTTATTACTGCATGCAAGGTACACAC |
| | | | TGGCCTCTCACCTTCGGCCAAGGGACACGACTGGAGATTAAA |
| VY022 | 85 | HCDR1 | GFTFSTYS |
| | 100 | HCDR2 | ISSGSSYI |
| | 118 | HCDR3 | TVTTHFHH |
| | 1308 | FR H1 | EVQLVESGGGLVKPGGSLRLSCAAS |
| | 1316 | FR H2 | MNWVRQAPGKGLEWVSS |
| | 1330 | FR H3 | YYADSVKGRFTISRDNAKNSLYLQMNSLRAEDTAVYYC |
| | 1339 | FR H4 | WGQGTLVTVSS |
| | 134 | LCDR1 | SGINVGAYR |
| | 1283 | LCDR2 | YKSDSDK |
| | 1293 | LCDR3 | MIWHSSAWV |
| | 1353 | FR L1 | QAVLTQPSSLSASPGASARLTCTLR |
| | 1367 | FR L2 | LYWYQQKPGSPPQYLLR |
| | 1384 | FR L3 | QQGSGVPSRFSGSKDASANAGILLISGLQSEDEADYYC |
| | 1393 | FR L4 | FGGGTKLTVL |
| | 10 | VH | EVQLVESGGGLVKPGGSLRLSCAASGFTFSTYSMNWVRQAPGKGLEWVS |
| | | | SISSGSSYIYYADSVKGRFTISRDNAKNSLYLQMNSLRAEDTAVYYCTV |
| | | | TTHFHHWGQGTLVTVSS |
| | 29 | VL | QAVLTQPSSLSASPGASARLTCTLRSGINVGAYRLYWYQQKPGSPPQYL |
| | | | LRYKSDSDKQQGSGVPSRFSGSKDASANAGILLISGLQSEDEADYYCMI |
| | | | WHSSAWVFGGGTKLTVL |
| | 48 | VH (DNA) | GAGGTGCAGCTGGTGGAGTCTGGGGGAGGCCTGGTCAAGCCTGGGGGGT |
| | | | CCCTGAGACTCTCCTGTGCAGCCTCTGGATTCACCTTCAGTACCTATAG |
| | | | CATGAACTGGGTCCGCCAGGCTCCAGGGAAGGGGCTGGAGTGGGTCTCA |
| | | | TCCATTAGTAGTGGTAGTAGTTACATATACTACGCAGACTCAGTGAAGG |
| | | | GCCGATTCACCATCTCCAGAGACAACGCCAAGAACTCACTGTATCTGCA |
| | | | AATGAACAGCCTGAGAGCCGAGGACACGGCTGTGTATTACTGTACAGTA |
| | | | ACTACACACTTCCACCACTGGGGCCAGGGCACCCTGGTCACCGTCTCCT |
| | | | CA |
| | 68 | VL (DNA) | CAGGCTGTGCTGACTCAGCCGTCTTCCCTCTCTGCATCTCCTGGAGCAT |
| | | | CAGCCAGACTCACCTGCACCTTGCGCAGTGGCATCAATGTTGGTGCCTA |
| | | | CAGGCTATACTGGTACCAGCAGAAGCCAGGAAGTCCTCCCCAGTATCTC |
| | | | CTGAGGTACAAATCAGACTCAGATAAGCAGCAGGGCTCTGGAGTCCCCA |
| | | | GCCGCTTCTCTGGATCCAAAGATGCTTCGGCCAATGCAGGGATTTTACT |
| | | | CATCTCTGGGCTCCAGTCTGAGGATGAGGCTGACTATTACTGTATGATT |
| | | | TGGCACAGCAGCGCTTGGGTGTTCGGCGGAGGGACCAAGCTGACCGTCC |
| | | | TA |
| VY001 | 86 | HCDR1 | GFTFSSYN |
| | 102 | HCDR2 | ISSSSNTI |
| | 120 | HCDR3 | ATLGRGY |
| | 1303 | FR H1 | [sequence omitted] |
| | 1312 | FR H2 | MNWVRQAPGKGLEWISY |
| | 1332 | FR H3 | YYADSVKGRFTVSRDNAKNSLYLQMNSLRDEDTAVYYC |
| | 1342 | FR H4 | WGQGTLVIASS |
| | 127 | LCDR1 | QSLVHSDGNTY |
| | | LCDR2 | KIS |
| | 1286 | LCDR3 | MQATQFPRT |
| | 1355 | FR L1 | DVVMTQTPLSSPVTLGQPASISCRSS |
| | 1360 | FR L2 | LSWLQQRPGQPPRLLIY |
| | 1376 | FR L3 | NRFSGVPDRFSGSGAGTDFTLKISRVEAEDVGVYYC |
| | 1396 | FR L4 | FGQGTKLEIK |
| | 12 | VH | EVQLVESGGGLVQPGGSLRLSCAASGFTFSSYNMNWVRQAPGKGLEWIS |
| | | | YISSSSNTIYYADSVKGRFTVSRDNAKNSLYLQMNSLRDEDTAVYYCAT |
| | | | LGRGYWGQGTLVIASS |
| | 31 | VL | DVVMTQTPLSSPVTLGQPASISCRSSQSLVHSDGNTYLSWLQQRPGQPP |
| | | | RLLIYKISNRFSGVPDRFSGSGAGTDFTLKISRVEAEDVGVYYCMQATQ |
| | | | FPRTFGQGTKLEIK |
| | 46 | VH (DNA) | GAGGTGCAACTGGTGGAGTCTGGGGGAGGCTTGGTACAGCCTGGGGGGT |
| | | | CCCTGAGACTCTCCTGTGCAGCCTCTGGATTCACCTTCAGTAGCTATAA |
| | | | CATGAACTGGGTTCGCCAGGCTCCAGGGAAGGGGCTGGAGTGGATTTCA |
| | | | TACATTAGTAGTAGTAGTAATACCATATACTACGCAGACTCTGTGAAGG |
| | | | GCCGATTCACCGTCTCCAGGGACAATGCCAAGAACTCACTGTATCTGCA |
| | | | AATGAACAGCCTGAGAGACGAGGACACGGCTGTGTATTACTGTGCGACT |
| | | | CTGGGGAGGGGCTACTGGGGCCAGGGAACCCTGGTCATCGCCTCCTCA |
| | 65 | VL (DNA) | GATGTTGTGATGACCCAGACTCCACTCTCCTCACCTGTCACCCTTGGAC |
| | | | AGCCGGCCTCCATCTCCTGCAGGTCTAGTCAAAGCCTCGTACACAGTGA |
| | | | TGGAAACACCTACTTGAGTTGGCTTCAGCAGAGGCCAGGCCAGCCTCCA |
| | | | AGACTCCTAATTTATAAGATTTCTAACCGGTTCTCTGGGGTCCCAGACA |
| | | | GATTCAGTGGCAGTGGGGCAGGGACAGATTTCACACTGAAAATCAGCAG |
| | | | GGTGGAAGCTGAGGATGTCGGGGTTTATTACTGCATGCAAGCTACACAA |
| | | | TTTCCTCGCACTTTTGGCCAGGGGACCAAGCTGGAGATCAAA |
| VY019 | 87 | HCDR1 | GGSISSYY |
| | 103 | HCDR2 | IDTSGST |
| | 121 | HCDR3 | ARGGDGYRY |
| | 1305 | FR H1 | QVQLQESGPGLVKPSETLSLTCTVS |
| | 1313 | FR H2 | WTWIRQPAGKGLEWIGR |
| | 1333 | FR H3 | NYNPSLKSRVTMSIDTSKKQFSLKLSSVTAADTAVYYC |
| | 1339 | FR H4 | WGQGTLVTVSS |
| | 132 | LCDR1 | ALPKQY |
| | | LCDR2 | KDS |
| | 1295 | LCDR3 | QSTDSSGSWV |
| | 1351 | FR L1 | SYELTQPPSVSVSPGQTARITCSGD |
| | 1369 | FR L2 | ACWYQQKPGQAPVLVIY |
| | 1385 | FR L3 | ERPSGIPERFSGSSSGTTVTLTITGVQAEDEADYYC |
| | 1393 | FR L4 | FGGGTKLTVL |
| | 13 | VH | QVQLQESGPGLVKPSETLSLTCTVSGGSISSYYWTWIRQPAGKGLEWIG |
| | | | RIDTSGSTNYNPSLKSRVTMSIDTSKKQFSLKLSSVTAADTAVYYCARG |
| | | | GDGYRYWGQGTLVTVSS |
| | 32 | VL | SYELTQPPSVSVSPGQTARITCSGDALPKQYACWYQQKPGQAPVLVIYK |
| | | | DSERPSGIPERFSGSSSGTTVTLTITGVQAEDEADYYCQSTDSSGSWVF |
| | | | GGGTKLTVL |
| | 45 | VH (DNA) | CAGGTGCAGCTGCAGGAGTCGGGCCCAGGACTGGTGAAGCCTTCGGAGA |
| | | | CCCTGTCCCTCACCTGCACTGTCTCTGGTGGCTCCATCAGTAGTTACTA |
| | | | CTGGACCTGGATCCGGCAGCCCGCCGGGAAGGGACTGGAGTGGATTGGG |
| | | | CGTATCGATACCAGTGGGAGCACCAACTACAACCCCTCCCTCAAGAGTC |
| | | | GAGTCACCATGTCAATAGACACGTCCAAGAAACAGTTCTCCCTGAAGCT |
| | | | GAGCTCTGTGACCGCCGCGGACACGGCCGTGTATTACTGTGCGAGAGGG |
| | | | GGAGATGGCTACCGCTACTGGGGCCAGGGAACCCTGGTCACCGTCTCCT |
| | | | CA |
| | 64 | VL (DNA) | TCCTATGAGCTGACACAGCCACCCTCGGTGTCAGTGTCCCCAGGACAGA |
| | | | CGGCCAGGATCACCTGCTCTGGAGATGCATTGCCAAAGCAATATGCTTG |
| | | | TTGGTACCAGCAGAAGCCAGGCCAGGCCCCTGTGCTGGTGATATATAAA |
| | | | GACAGTGAGAGGCCCTCAGGGATCCCTGAGCGATTCTCTGGCTCCAGCT |
| | | | CAGGGACAACAGTCACGTTGACCATCACTGGAGTCCAGGCAGAAGATGA |
| | | | GGCTGACTATTACTGTCAATCCACAGACAGCAGTGGTTCTTGGGTGTTC |
| | | | GGCGGAGGGACCAAGCTGACCGTCCTA |
| VY020 | 78 | HCDR1 | GFTFSSYS |
| | 104 | HCDR2 | ISSSNSTI |
| | 122 | HCDR3 | ARRSLGDY |
| | 1303 | FR H1 | [sequence omitted] |
| | 1312 | FR H2 | MNWVRQAPGKGLEWISY |
| | 1334 | FR H3 | KYADSVKGRFTISRDNAKNSLYLQMNSLRDEDTAVYYC |
| | 1343 | FR H4 | WGQGTLVIVSS |
| | 135 | LCDR1 | QSVSSY |
| | | LCDR2 | DVS |
| | 1296 | LCDR3 | QQRRNWPYT |
| | 1347 | FR L1 | [sequence omitted] |
| | 1370 | FR L2 | LAWYLQKPGQAPRLLIY |
| | 1386 | FR L3 | NRATGIPARFSGSGSGTDFTLTISRLEPEDFAVYYC |
| | 1396 | FR L4 | FGQGTKLEIK |
| | 14 | VH | EVQLVESGGGLVQPGGSLRLSCAASGFTFSSYSMNWVRQAPGKGLEWIS |
| | | | YISSSNSTIKYADSVKGRFTISRDNAKNSLYLQMNSLRDEDTAVYYCAR |
| | | | RSLGDYWGQGTLVIVSS |
| | 33 | VL | EIVLTQSPATLSLSPGERATLSCRASQSVSSYLAWYLQKPGQAPRLLIY |
| | | | DVSNRATGIPARFSGSGSGTDFTLTISRLEPEDFAVYYCQQRRNWPYTF |
| | | | GQGTKLEIK |
| | 44 | VH (DNA) | GAGGTGCAGCTGGTGGAGTCTGGGGGAGGCTTGGTACAGCCTGGGGGGT |
| | | | CCCTGAGACTCTCCTGTGCAGCCTCTGGATTCACCTTCAGTAGCTATAG |
| | | | CATGAACTGGGTCCGCCAGGCTCCAGGGAAGGGGCTGGAGTGGATTTCA |
| | | | TACATTAGTAGTAGTAATAGTACCATAAAGTACGCAGACTCTGTGAAGG |
| | | | GCCGATTCACCATCTCCAGAGACAATGCCAAGAACTCACTGTATCTGCA |
| | | | AATGAACAGCCTGAGAGACGAGGACACGGCTGTGTATTACTGTGCGAGA |
| | | | AGGAGTCTAGGTGACTACTGGGGCCAGGGAACCCTGGTCATCGTCTCCT |
| | | | CA |
| | 62 | VL (DNA) | GAAATTGTGTTGACACAGTCTCCAGCCACCCTGTCTTTGTCTCCAGGGG |
| | | | AAAGAGCCACCCTCTCCTGCAGGGCCAGTCAGAGTGTTAGCAGCTACTT |
| | | | AGCCTGGTACCTACAGAAACCTGGCCAGGCTCCCAGGCTCCTCATCTAT |
| | | | GATGTGTCCAACAGGGCCACTGGCATCCCAGCCAGGTTCAGTGGCAGTG |
| | | | GGTCTGGGACAGACTTCACTCTCACCATCAGCAGACTAGAGCCTGAAGA |
| | | | TTTTGCAGTTTATTACTGTCAGCAGCGTCGCAACTGGCCGTACACTTTT |
| | | | GGCCAGGGGACCAAGCTGGAGATCAAA |
| VY005 | 78 | HCDR1 | GFTFSSYS |
| | 104 | HCDR2 | ISSSNSTI |
| | 122 | HCDR3 | ARRSLGDY |
| | 1303 | FR H1 | [sequence omitted] |
| | 1312 | FR H2 | MNWVRQAPGKGLEWISY |
| | 1334 | FR H3 | KYADSVKGRFTISRDNAKNSLYLQMNSLRDEDTAVYYC |
| | 1343 | FR H4 | WGQGTLVIVSS |
| | 136 | LCDR1 | QGISCS |
| | | LCDR2 | AAS |
| | 1297 | LCDR3 | QQFNSYPFT |
| | 1356 | FR L1 | DIQLTQSPSFLSASVGDRVTITCRAS |
| | 1371 | FR L2 | LAWYQQKPGKAPKLLIY |
| | 1387 | FR L3 | TLQSGVPSRFSGSGSGTEFTLTISSLQPEDFATYYC |
| | 1400 | FR L4 | FGPGTKVDIK |
| | 14 | VH | EVQLVESGGGLVQPGGSLRLSCAASGFTFSSYSMNWVRQAPGKGLEWIS |
| | | | YISSSNSTIKYADSVKGRFTISRDNAKNSLYLQMNSLRDEDTAVYYCAR |
| | | | RSLGDYWGQGTLVIVSS |
| | 34 | VL | DIQLTQSPSFLSASVGDRVTITCRASQGISCSLAWYQQKPGKAPKLLIY |
| | | | AASTLQSGVPSRFSGSGSGTEFTLTISSLQPEDFATYYCQQFNSYPFTF |
| | | | GPGTKVDIK |
| | 44 | VH (DNA) | GAGGTGCAGCTGGTGGAGTCTGGGGGAGGCTTGGTACAGCCTGGGGGGT |
| | | | CCCTGAGACTCTCCTGTGCAGCCTCTGGATTCACCTTCAGTAGCTATAG |
| | | | CATGAACTGGGTCCGCCAGGCTCCAGGGAAGGGGCTGGAGTGGATTTCA |
| | | | TACATTAGTAGTAGTAATAGTACCATAAAGTACGCAGACTCTGTGAAGG |
| | | | GCCGATTCACCATCTCCAGAGACAATGCCAAGAACTCACTGTATCTGCA |
| | | | AATGAACAGCCTGAGAGACGAGGACACGGCTGTGTATTACTGTGCGAGA |
| | | | AGGAGTCTAGGTGACTACTGGGGCCAGGGAACCCTGGTCATCGTCTCCT |
| | | | CA |
| | 63 | VL (DNA) | GACATCCAGTTGACCCAGTCTCCATCCTTCCTGTCTGCATCTGTAGGAG |
| | | | ACAGAGTCACCATCACTTGCCGGGCCAGTCAGGGCATTAGCTGTTCTTT |
| | | | AGCCTGGTATCAGCAAAAACCAGGGAAAGCCCCTAAGCTCCTGATCTAT |
| | | | GCTGCATCCACTTTGCAAAGTGGGGTCCCATCAAGGTTCAGCGGCAGTG |
| | | | GATCTGGGACAGAATTCACTCTCACAATCAGCAGCCTGCAGCCTGAAGA |
| | | | TTTTGCAACTTATTACTGTCAACAGTTTAATAGTTACCCATTCACTTTC |
| | | | GGCCCTGGGACCAAAGTGGATATCAAA |
| VY002 | 88 | HCDR1 | GFTFSNAW |
| | 105 | HCDR2 | IKSKTDGGTT |
| | 123 | HCDR3 | VTDYPKDV |
| | 1308 | FR H1 | EVQLVESGGGLVKPGGSLRLSCAAS |
| | 1318 | FR H2 | MSWVRQAPGKGLEWFGR |
| | 1335 | FR H3 | DYAAPVKGRFTISRDDSKNTLYLQMNSLKTEDTAVYYC |
| | 1341 | FR H4 | WGQGTTVTVSS |
| | 1279 | LCDR1 | QSVLYSSKNKNY |
| | | LCDR2 | WAS |
| | 1298 | LCDR3 | QQYYSSPYT |
| | 1357 | FR L1 | DIVMTQSPDSLAVSLGERATINCKSS |
| | 1372 | FR L2 | LAWYQQKPGQPPKLLIY |
| | 1388 | FR L3 | TRESGVPDRFSGSGSGTDFTLAISSLQAEDVAVYYC |
| | 1396 | FR L4 | FGQGTKLEIK |
| | 15 | VH | EVQLVESGGGLVKPGGSLRLSCAASGFTFSNAWMSWVRQAPGKGLEWFG |
| | | | RIKSKTDGGTTDYAAPVKGRFTISRDDSKNTLYLQMNSLKTEDTAVYYC |
| | | | VTDYPKDVWGQGTTVTVSS |
| | 35 | VL | DIVMTQSPDSLAVSLGERATINCKSSQSVLYSSKNKNYLAWYQQKPGQP |
| | | | PKLLIYWASTRESGVPDRFSGSGSGTDFTLAISSLQAEDVAVYYCQQYY |
| | | | SSPYTFGQGTKLEIK |
| | 43 | VH (DNA) | GAGGTGCAGCTGGTGGAGTCTGGGGGAGGCTTGGTAAAGCCTGGGGGGT |
| | | | CCCTTAGACTCTCCTGTGCAGCCTCTGGATTCACTTTCAGTAACGCCTG |
| | | | GATGAGCTGGGTCCGCCAGGCTCCAGGGAAGGGGCTGGAGTGGTTTGGC |
| | | | CGTATTAAAAGCAAAACTGATGGTGGGACAACAGACTACGCTGCACCCG |
| | | | TGAAAGGCAGATTCACCATCTCAAGAGATGACTCAAAAAACACGCTGTA |
| | | | TCTGCAAATGAACAGCCTGAAAACCGAGGACACAGCCGTGTATTACTGT |
| | | | GTCACAGATTACCCGAAGGACGTCTGGGGCCAAGGGACCACGGTCACCG |
| | | | TCTCCTCA |
| | 61 | VL (DNA) | GACATCGTGATGACCCAGTCTCCAGACTCCCTGGCTGTGTCTCTGGGCG |
| | | | AGAGGGCCACCATCAACTGCAAGTCCAGCCAGAGTGTTTTATACAGCTC |
| | | | CAAAAATAAGAACTACTTAGCTTGGTACCAGCAGAAACCAGGACAGCCT |
| | | | CCTAAGCTGCTCATTTACTGGGCATCTACCCGGGAATCCGGGGTCCCTG |
| | | | ACCGATTCAGTGGCAGCGGGTCTGGGACAGATTTCACTCTCGCCATCAG |
| | | | CAGCCTGCAGGCTGAAGATGTGGCAGTTTATTACTGTCAGCAATATTAT |
| | | | AGTAGTCCGTACACTTTTGGCCAGGGGACCAAGCTGGAGATCAAA |
| VY014 | 89 | HCDR1 | GFTFNNYD |
| | 106 | HCDR2 | IGAAGDT |
| | 124 | HCDR3 | ARAGETLEGATIGYYYGMDV |
| | 1303 | FR H1 | [sequence omitted] |
| | 1319 | FR H2 | MHWVRQAAGKGLEWVST |
| | 1336 | FR H3 | YYPGSVKGRFIISRENAKNSLYLQMNSLRAGDTAVYYC |
| | 1341 | FR H4 | WGQGTTVTVSS |
| | 1280 | LCDR1 | QSLLHSNGYNY |
| | | LCDR2 | LGS |
| | 1299 | LCDR3 | MQALQIPLT |
| | 1358 | FR L1 | DILMTQSPLSLPVTPGEPASISCRSS |
| | 1373 | FR L2 | LDWYLQKPGQSPQLLIY |
| | 1389 | FR L3 | NRASGVPDRFSGSGSGTDFTLKFSRVEAEDVGLYYC |
| | 1395 | FR L4 | FGGGTKVEIK |
| | 16 | VH | EVQLVESGGGLVQPGGSLRLSCAASGFTFNNYDMHWVRQAAGKGLEWVS |
| | | | TIGAAGDTYYPGSVKGRFIISRENAKNSLYLQMNSLRAGDTAVYYCARA |
| | | | GETLEGATIGYYYGMDVWGQGTTVTVSS |
| | 36 | VL | DILMTQSPLSLPVTPGEPASISCRSSQSLLHSNGYNYLDWYLQKPGQSP |
| | | | QLLIYLGSNRASGVPDRFSGSGSGTDFTLKFSRVEAEDVGLYYCMQALQ |
| | | | IPLTFGGGTKVEIK |
| | 42 | VH (DNA) | GAGGTGCAGCTGGTGGAGTCTGGGGGAGGCTTGGTACAGCCTGGGGGGT |
| | | | CCCTGAGACTCTCCTGTGCAGCCTCTGGATTCACCTTCAATAACTACGA |
| | | | CATGCACTGGGTCCGCCAAGCTGCAGGAAAAGGTCTGGAGTGGGTCTCA |
| | | | ACTATTGGTGCTGCTGGTGACACATATTATCCAGGCTCCGTGAAGGGCC |
| | | | GATTCATCATCTCCAGAGAAAATGCCAAGAACTCCTTGTATCTTCAAAT |
| | | | GAACAGCCTGAGAGCCGGGGACACGGCTGTGTATTACTGTGCAAGAGCC |
| | | | GGAGAGACCTTAGAGGGAGCTACTATCGGCTACTACTACGGTATGGACG |
| | | | TCTGGGGCCAGGGGACCACGGTCACCGTCTCCTCA |
| | 60 | VL (DNA) | GATATTCTGATGACTCAGTCTCCACTCTCCCTGCCCGTCACCCCTGGAG |
| | | | AGCCGGCCTCCATCTCCTGCAGGTCTAGTCAGAGCCTCCTGCATAGTAA |
| | | | TGGATACAACTATTTGGATTGGTACCTGCAGAAGCCAGGGCAGTCTCCA |
| | | | CAGCTCCTGATCTATTTGGGTTCTAATCGGGCCTCCGGGGTCCCTGACA |
| | | | GGTTCAGTGGCAGTGGATCAGGCACAGATTTTACACTGAAATTCAGCAG |
| | | | AGTGGAGGCTGAGGATGTTGGACTTTATTACTGCATGCAAGCTCTACAA |
| | | | ATTCCGCTCACTTTCGGCGGAGGGACCAAGGTGGAGATCAAA |
| VY008 | 90 | HCDR1 | GYTFTGYY |
| | 107 | HCDR2 | INPNSGGT |
| | 125 | HCDR3 | AGDAFDI |
| | 1309 | FR H1 | [sequence omitted] |
| | 1320 | FR H2 | MHWVRQAPGQGLEWMGW |
| | 1337 | FR H3 | NYAQKFQGRVTMTRDTSISTAYMELSRLRSDDTAVYYC |
| | 1344 | FR H4 | WGQGTMVTVSS |
| | 1281 | LCDR1 | QSVLYSSNNKNY |
| | | LCDR2 | WAS |
| | 1300 | LCDR3 | QQYYSTPLT |
| | 1357 | FR L1 | DIVMTQSPDSLAVSLGERATINCKSS |
| | 1372 | FR L2 | LAWYQQKPGQPPKLLIY |
| | 1390 | FR L3 | TRESGVPDRFSGSGSGTDFTLTISSLQAEDVAVYYC |
| | 1395 | FR L4 | FGGGTKVEIK |
| | 17 | VH | QVQLVQSGAEVKKPGASVKVSCKASGYTFTGYYMHWVRQAPGQGLEWMG |
| | | | WINPNSGGTNYAQKFQGRVTMTRDTSISTAYMELSRLRSDDTAVYYCAG |
| | | | DAFDIWGQGTMVTVSS |
| | 37 | VL | DIVMTQSPDSLAVSLGERATINCKSSQSVLYSSNNKNYLAWYQQKPGQP |
| | | | PKLLIYWASTRESGVPDRFSGSGSGTDFTLTISSLQAEDVAVYYCQQYY |
| | | | STPLTFGGGTKVEIK |
| | 53 | VH (DNA) | CAGGTGCAGCTGGTGCAGTCTGGGGCTGAGGTGAAGAAGCCTGGGGCCT |
| | | | CAGTGAAGGTCTCCTGCAAGGCTTCTGGATACACCTTCACCGGCTACTA |
| | | | TATGCACTGGGTGCGACAGGCCCCTGGACAAGGGCTTGAGTGGATGGGA |
| | | | TGGATCAACCCTAACAGTGGTGGCACAAACTATGCACAGAAGTTTCAGG |
| | | | GCAGGGTCACCATGACCAGGGACACGTCCATCAGCACAGCCTACATGGA |
| | | | GCTGAGCAGGCTGAGATCTGACGACACGGCCGTGTATTACTGTGCTGGG |
| | | | GATGCTTTTGATATCTGGGGCCAAGGGACAATGGTCACCGTCTCTTCA |
| | 73 | VL (DNA) | GACATCGTGATGACCCAGTCTCCAGACTCCCTGGCTGTGTCTCTGGGCG |
| | | | AGAGGGCCACCATCAACTGCAAGTCCAGCCAGAGTGTTTTATACAGCTC |
| | | | CAACAATAAGAACTACTTAGCTTGGTACCAGCAGAAACCAGGACAGCCT |
| | | | CCTAAGCTGCTCATTTACTGGGCATCTACCCGGGAATCCGGGGTCCCTG |
| | | | ACCGATTCAGTGGCAGCGGGTCTGGGACAGATTTCACTCTCACCATCAG |
| | | | CAGCCTGCAGGCTGAAGATGTGGCAGTTTATTACTGTCAGCAATATTAT |
| | | | AGTACTCCGCTCACTTTCGGCGGAGGGACCAAGGTGGAGATCAAA |
| VY013 | 91 | HCDR1 | GFSLINARMA |
| | 108 | HCDR2 | IFSNDEK |
| | 126 | HCDR3 | ARIRGYSYNYGMDV |
| | 1310 | FR H1 | QVTLKESGPVLVKPTETLTLTCTVS |
| | 1321 | FR H2 | VSWIRQPPGKALEWLAH |
| | 1338 | FR H3 | SYSTSLKSRLTISKDTSKSQVVLIMTNMDPVDTATYYC |
| | 1341 | FR H4 | WGQGTTVTVSS |
| | 1282 | LCDR1 | QSLLHSNGYIY |
| | | LCDR2 | VGS |
| | 1301 | LCDR3 | MQTLQIPRT |
| | 1359 | FR L1 | DIVMTQSPLSLPVIPGEPASISCRSS |
| | 1373 | FR L2 | LDWYLQKPGQSPQLLIY |
| | 1391 | FR L3 | NRASGVPDRFSGSGSGTDFKLKISRVEAEDVGVYYC |
| | 1395 | FR L4 | FGGGTKVEIK |
| | 18 | VH | QVTLKESGPVLVKPTETLTLTCTVSGFSLINARMAVSWIRQPPGKALEW |
| | | | LAHIFSNDEKSYSTSLKSRLTISKDTSKSQVVLIMTNMDPVDTATYYCA |
| | | | RIRGYSYNYGMDVWGQGTTVTVSS |
| | 38 | VL | DIVMTQSPLSLPVIPGEPASISCRSSQSLLHSNGYIYLDWYLQKPGQSP |
| | | | QLLIYVGSNRASGVPDRFSGSGSGTDFKLKISRVEAEDVGVYYCMQTLQ |
| | | | IPRTFGGGTKVEIK |
| | 40 | VH (DNA) | CAGGTCACCTTGAAGGAGTCTGGTCCTGTGCTGGTGAAACCCACAGAGA |
| | | | CCCTCACGCTGACCTGCACCGTCTCTGGGTTCTCACTCATCAATGCTAG |
| | | | AATGGCTGTGAGCTGGATCCGTCAGCCCCCAGGGAAGGCCCTGGAGTGG |
| | | | CTTGCACACATTTTTTCGAATGACGAAAAATCCTACAGCACATCTCTGA |
| | | | AGAGCAGACTCACCATCTCCAAGGACACCTCCAAAAGCCAGGTGGTCCT |
| | | | TATCATGACCAACATGGACCCTGTGGACACAGCCACATATTACTGTGCA |
| | | | CGGATCCGTGGATACAGCTATAACTACGGTATGGACGTCTGGGGCCAAG |
| | | | GGACCACGGTCACCGTCTCCTCA |
| | 58 | VL (DNA) | GATATTGTGATGACTCAGTCTCCACTCTCCCTGCCCGTCATCCCTGGAG |
| | | | AGCCGGCCTCCATCTCCTGCAGGTCTAGTCAGAGCCTCCTGCATAGTAA |
| | | | TGGATACATCTATTTGGATTGGTACCTGCAGAAGCCAGGGCAGTCTCCA |
| | | | CAGCTCCTGATCTATGTGGGTTCTAATCGGGCCTCCGGGGTCCCTGACA |
| | | | GGTTCAGTGGCAGTGGATCAGGCACAGATTTCAAACTGAAAATCAGCAG |
| | | | AGTGGAGGCTGAGGATGTTGGGGTTTATTACTGCATGCAAACTCTACAA |
| | | | ATTCCGCGCACTTTCGGCGGAGGGACCAAGGTGGAGATCAAA |

[1393] Anti-tau antibodies of the present disclosure may include variable domain amino acid sequences according to any of those listed in Table 1. In some embodiments, anti-tau antibody variable domains include fragments or variants of variable domain amino acid sequences listed. For instance, in some embodiments, the anti-tau antibody may comprise a VH comprising an amino acid sequence selected from SEQ ID NO: 1143, 3, 1140, 1142, 11, 1, 2, 1141, 1144, 1145, 10, 12, 13, 14, 15, 16, 17, or 18, or an amino acid sequence at least 70%, 75%, 80%, 85%, 90%, 92%, 95%, 96%, 97%, 98%, or 99% sequence identity thereto, or an amino acid sequence having at least one, two, or three modifications, but not more than 30, 20, or 10 modifications (e.g., 1-30, 1-20, 1-10, 1-5, 1-4, 1-3, 1-2, or 1 amino acid modification, such as amino acid substitutions (e.g., conservative substitutions)) relative to the VH sequence. In some embodiments, the anti-tau antibody may comprise a VL comprising an amino acid sequence selected from SEQ ID NO: 25, 21, 22, 24, 30, 19, 20, 23, 26, 27, 28, 29, 31, 32, 33, 34, 35, 36, 37, or 38, or an amino acid sequence at least 70%, 75%, 80%, 85%, 90%, 92%, 95%, 96%, 97%, 98%, or 99% sequence identity thereto, or an amino acid sequence having at least one, two, or three modifications, but not more than 30, 20, or 10 modifications (e.g., 1-30, 1-20, 1-10, 1-5, 1-4, 1-3, 1-2, or 1 amino acid modification, such as amino acid substitutions (e.g., conservative substitutions)) relative to the VL sequence. In some embodiment, the anti-tau antibody may comprise a VH and a VL, wherein (a) the VH comprises an amino acid sequence selected from SEQ ID NO: 1143, 3, 1140, 1142, 11, 1, 2, 1141, 1144, 1145, 10, 12, 13, 14, 15, 16, 17, or 18, or an amino acid sequence at least 70%, 75%, 80%, 85%, 90%, 92%, 95%, 96%, 97%, 98%, or 99% sequence identity thereto, or an amino acid sequence having at least one, two, or three modifications, but not more than 30, 20, or 10 modifications (e.g., amino acid substitutions, such as conservative substitutions), relative to the VH sequence, and/or (b) the VL comprises an amino acid sequence selected from SEQ ID NO: 25, 21, 22, 24, 30, 19, 20, 23, 26, 27, 28, 29, 31, 32, 33, 34, 35, 36, 37, or 38, or an amino acid sequence at least 70%, 75%, 80%, 85%, 90%, 92%, 95%, 96%, 97%, 98%, or 99% sequence identity thereto, or an amino acid sequence having at least one, two, or three modifications, but not more than 30, 20, or 10 modifications (e.g., 1-30, 1-20, 1-10, 1-5, 1-4, 1-3, 1-2, or 1 amino acid modification, such as amino acid substitutions (e.g., conservative substitutions)), relative to the VL sequence.

[1394] Provided herein are isolated, e.g., recombinant, antibodies which bind to human tau (e.g., human tau having the sequence set forth in SEQ ID NO: 1404), comprising a VH and/or VL sequence selected from: (i) SEQ ID NOs: 1143 and/or 25, respectively; (ii) SEQ ID NOs: 3 and/or 21, respectively; (iii) SEQ ID NOs: 1140 and/or 22, respectively; (iv) SEQ ID NOs: 1142 and/or 24, respectively; (v) SEQ ID NOs: 11 and/or 30, respectively; (vi) SEQ ID NOs: 1 and/or 19, respectively; (vii) SEQ ID NOs: 2 and/or 20, respectively; (viii) SEQ ID NOs: 1141 and/or 23, respectively; (ix) SEQ ID NOs: 1144 and/or 26, respectively; (x) SEQ ID NOs: 1145 and/or 27, respectively; (xi) SEQ ID NOs: 10 and/or 28, respectively; (xii) SEQ ID NOs: 10 and/or 29, respectively; (xiii) SEQ ID NOs: 12 and/or 31, respectively; (xiv) SEQ ID NOs: 13 and/or 32, respectively; (xv) SEQ ID NOs: 14 and/or 33, respectively; (xvi) SEQ ID NOs: 14 and/or 34, respectively; (xvii) SEQ ID NOs: 15 and/or 35, respectively; (xviii) SEQ ID NOs: 16 and/or 36, respectively; (xix) SEQ ID NOs: 17 and/or 37, respectively; or (xx) SEQ ID NOs: 18 and/or 38, respectively. In some embodiments, the antibodies comprise a VH and/or VL sequence having at least 70%, 75%, 80%, 85%, 90%, 92%, 95%, 96%, 97%, 98%, or 99% sequence identity to the sequences of any one of (i)-(xx). In some embodiments, the antibodies comprise a VH and/or VL sequence having at least one, two, or three modifications, but not more than 30, 20, or 10 modifications (e.g., 1-30, 1-20, 1-10, 1-5, 1-4, 1-3, 1-2, or 1 amino acid modification, such as amino acid substitutions (e.g., conservative substitutions)), relative to the VH and/or VL sequences of any one of (i)-(xx).

[1395] In some embodiments, the antibody which binds to human tau comprises VH and VL sequences selected from: (i) SEQ ID NOs: 1143 and 25, respectively; (ii) SEQ ID NOs: 3 and 21, respectively; (iii) SEQ ID NOs: 1140 and 22, respectively; (iv) SEQ ID NOs: 1142 and 24, respectively; (v) SEQ ID NOs: 11 and 30, respectively; (vi) SEQ ID NOs: 1 and 19, respectively; (vii) SEQ ID NOs: 2 and 20, respectively; (viii) SEQ ID NOs: 1141 and 23, respectively; (ix) SEQ ID NOs: 1144 and 26, respectively; (x) SEQ ID NOs: 1145 and 27, respectively; (xi) SEQ ID NOs: 10 and 28, respectively; (xii) SEQ ID NOs: 10 and 29, respectively; (xiii) SEQ ID NOs: 12 and 31, respectively; (xiv) SEQ ID NOs: 13 and 32, respectively; (xv) SEQ ID NOs: 14 and 33, respectively; (xvi) SEQ ID NOs: 14 and 34, respectively; (xvii) SEQ ID NOs: 15 and 35, respectively; (xviii) SEQ ID NOs: 16 and 36, respectively; (xix) SEQ ID NOs: 17 and 37, respectively; or (xx) SEQ ID NOs: 18 and 38, respectively. In some embodiments, the antibodies comprise a VH and VL sequences having at least 70%, 75%, 80%, 85%, 90%, 92%, 95%, 96%, 97%, 98%, or 99% sequence identity to the sequences of any one of (i)-(xx). In some embodiments, the antibodies comprise a VH and/or VL sequence having at least one, two, or three modifications, but not more than 30, 20, or 10 modifications (e.g., 1-30, 1-20, 1-10, 1-5, 1-4, 1-3, 1-2, or 1 amino acid modification, such as amino acid substitutions (e.g., conservative substitutions)), relative to the VH and VL sequences of any one of (i)-(xx).

[1396] Anti-tau antibody variable domains of the present disclosure may be encoded by nucleic acid sequences listed in Table 1. In some embodiments, nucleic acid sequences encoding anti-tau antibody variable domains of the present disclosure may include fragments or variants of the nucleic acid sequences listed. For instance, in some embodiments, the nucleic acid sequence encoding the VH may comprise a nucleotide sequence selected from SEQ ID NO: 51, 55, 54, 52, 47, 39, 56, 41, 50, 49, 48, 46, 45, 44, 43, 42, 53, or 40, or a nucleic acid sequence having at least 50%, 55%, 60%, 65%, 70%, 75%, 80%, 85%, 90%, 92%, 95%, 96%, 97%, 98%, or 99% sequence identity thereto. In some embodiments, the nucleic acid sequence encoding the VL may comprise a nucleotide sequence selected from SEQ ID NO: 67, 75, 74, 72, 66, 57, 76, 59, 70, 69, 68, 65, 64, 62, 63, 61, 60, 73, or 58, or a nucleic acid sequence having at least 50%, 55%, 60%, 65%, 70%, 75%, 80%, 85%, 90%, 92%, 95%, 96%, 97%, 98%, or 99% sequence identity thereto. In some embodiments, the nucleic acids described herein may encode an anti-tau antibody. In some embodiments, the anti-tau antibody may be encoded by a nucleic acid, or a combination of nucleic acids, comprising (a) a nucleotide sequence encoding a VH selected from SEQ ID NOs: 51, 55, 54, 52, 47, 39, 56, 41, 50, 49, 48, 46, 45, 44, 43, 42, 53, or 40, or a nucleic acid sequence having at least 50%, 55%, 60%, 65%, 70%, 75%, 80%, 85%, 90%, 92%, 95%, 96%, 97%, 98%, or 99% sequence identity thereto, and/or (b) a nucleotide sequence encoding a VL selected from SEQ ID NOs: 67, 75, 74, 72, 66, 57, 76, 59, 70, 69, 68, 65, 64, 62, 63, 61, 60, 73, or 58, or a nucleic acid sequence having at least 50%, 55%, 60%, 65%, 70%, 75%, 80%, 85%, 90%, 92%, 95%, 96%, 97%, 98%, or 99% sequence identity thereto. In some embodiments, the anti-tau antibody may be encoded by a nucleic acid, or a combination of nucleic acids, comprising a nucleotide sequence encoding a VH and a nucleotide sequence encoding a VL selected from: (i) SEQ ID NOs: 51 and 71, respectively, (ii) SEQ ID NOs: 55 and 75, respectively, (iii) SEQ ID NOs: 54 and 74, respectively, (iv) SEQ ID NOs: 52 and 72, respectively, (v) SEQ ID NOs: 47 and 66, respectively, (vi) SEQ ID NOs: 39 and 57, respectively, (vii) SEQ ID NOs: 56 and 76, respectively, (viii) SEQ ID NOs: 41 and 59, respectively, (ix) SEQ ID NOs: 50 and 70, respectively, (x) SEQ ID NOs: 49 and 69, respectively, (xi) SEQ ID NOs: 48 and 67, respectively, (xii) SEQ ID NOs: 48 and 68, respectively, (xiii) SEQ ID NOs: 46 and 65, respectively, (xiv) SEQ ID NOs: 45 and 64, respectively, (xv) SEQ ID NOs: 44 and 62, respectively, (xvi) SEQ ID NOs: 44 and 63, respectively, (xvii) SEQ ID NOs: 43 and 61, respectively, (xviii) SEQ ID NOs: 42 and 60, respectively, (ix) SEQ ID NOs: 53 and 73, respectively, or (xx) SEQ ID NOs: 40 and 58, respectively, In some embodiments, nucleic acid sequences encoding anti-tau antibody variable domains of the present disclosure include codon-optimized variants of the nucleic acid sequences listed.

[1397] In some embodiments, anti-tau antibodies of the present disclosure include one or more CDRs (e.g., 1, 2, 3, 4, 5, or all 6 CDRs), e.g., CDRs based on the Chothia numbering system, with amino acid sequences derived from one or more variable domain amino acid sequence provided in Table 1. In some embodiments, anti-tau antibodies of the present disclosure include one or more CDRs (e.g., 1, 2, 3, 4, 5, or all 6 CDRs) encoded by nucleic acid sequences derived from one or more variable domain nucleic acid sequences provided in Table 1. Anti-tau antibody CDRs may include one or more amino acid residues involved in antigen binding (e.g., as determined by co-crystallography with bound antigen). Anti-tau antibodies of the present disclosure may include CDRs identified through CDR analysis of variable domain sequences presented herein via co-crystallography with bound antigen; by computational assessments based on comparisons with other antibodies (e.g., see Strohl, W. R. Therapeutic Antibody Engineering. Woodhead Publishing, Philadelphia PA. 2012. Ch. 3, p47-54); or art-recognized Kabat, Chothia, Al-Lazikani, Lefranc, IMGT, or Honegger numbering schemes, as described previously. In some embodiments, anti-tau antibody CDR amino acid sequences may include any of those presented in Table 1, or fragments thereof. In some embodiments, anti-tau antibodies of the present disclosure include CDRs that include amino acid sequence variants of those listed. Amino acid fragments or variants included in anti-tau antibody CDRs may include from about 50% to about 99.9% sequence identity (e.g. from about 50% to about 60%, from about 55% to about 65%, from about 60% to about 70%, from about 65% to about 75%, from about 70% to about 80%, from about 75% to about 85%, from about 80% to about 90%, from about 85% to about 95%, from about 90% to about 99.9%, from about 95% to about 99.9%, about 97%, about 97.5%, about 98%, about 98.5%, about 99%, about 99.5%, about 99.6%, about 99.7% or about 99.8%) with one or more of the CDR sequences.

[1398] The anti-tau antibodies described herein may comprise a VH comprising one, two, or three of a heavy chain complementary determining region 1 (HCDR1), a heavy chain complementary determining region 2 (HCDR2), and a heavy chain complementary determining region 3 (HCDR3), and/or a VL comprising one, two, or three of a light chain complementary determining region 1 (LCDR1), a light chain complementary determining region 2 (LCDR2), and a light chain complementary determining region 3 (LCDR3), e.g., CDRs based on the Chothia numbering system, of any one of VY011, VY007, VY004, VY006, VY018, VY003, VY016, VY017, VY012, VY009, VY010, VY022, VY001, VY019, VY020, VY005, VY002, VY014, VY008, and VY013.

[1399] In some embodiments, provided herein is a recombinant antibody that binds to human tau, wherein the antibody comprises the heavy chain CDR1, CDR2, and CDR3, and/or light chain CDR1, CDR2, and CDR3 of an antibody comprising a heavy chain variable region (VH) and light chain variable region (VL) comprising: (i) SEQ ID NOs: 1143 and 25, respectively; (ii) SEQ ID NOs: 3 and 21, respectively; (iii) SEQ ID NOs: 1140 and 22, respectively; (iv) SEQ ID NOs: 1142 and 24, respectively; (v) SEQ ID NOs: 11 and 30, respectively; (vi) SEQ ID NOs: 1 and 19, respectively; (vii) SEQ ID NOs: 2 and 20, respectively; (viii) SEQ ID NOs: 1141 and 23, respectively; (ix) SEQ ID NOs: 1144 and 26, respectively; (x) SEQ ID NOs: 1145 and 27, respectively; (xi) SEQ ID NOs: 10 and 28, respectively; (xii) SEQ ID NOs: 10 and 29, respectively; (xiii) SEQ ID NOs: 12 and 31, respectively; (xiv) SEQ ID NOs: 13 and 32, respectively; (xv) SEQ ID NOs: 14 and 33, respectively; (xvi) SEQ ID NOs: 14 and 34, respectively; (xvii) SEQ ID NOs: 15 and 35, respectively; (xviii) SEQ ID NOs: 16 and 36, respectively; (xix) SEQ ID NOs: 17 and 37, respectively; or (xx) SEQ ID NOs: 18 and 38, respectively. In some embodiments, the CDR sequences are based on the Kabat numbering system, Chothia numbering system, or IMGT numbering system.

[1400] In some embodiments, provided herein are isolated, e.g., recombinant, antibodies which bind to human tau, comprising: (a) one, two, or all three HCDRs selected from a HCDR1 comprising an amino acid sequence selected from SEQ ID NO: 77, 78, 79, 80, 81, 82, 83, 84, 85, 86, 87, 88, 89, 90, or 91, a HCDR2 comprising an amino acid sequence selected from SEQ ID NO: 92, 93, 94, 95, 96, 97, 98, 99, 100, 101, 102, 103, 104, 105, 106, 107, or 108, and a HCDR3 comprising an amino acid sequence selected from SEQ ID NO: 109, 110, 111, 112, 113, 114, 115, 116, 117, 118, 119, 120, 121, 122, 123, 124, 125, or 126, and/or (b) one, two, or all three LCDRs selected from a LCDR1 comprising an amino acid sequence selected from SEQ ID NO: 127, 128, 129, 130, 131, 132, 133, 134, 135, 136, 1279, 1280, 1281, or 1282, a LCDR2 comprising an amino acid sequence selected from KIS, GNS, DVS, DAS, DDS, KDT, KVS, YKSDSDK (SEQ ID NO: 1283), KDS, AAS, WAS, LGS, or VGS, a LCDR3 comprising an amino acid sequence selected from SEQ ID NO: 1284, 1285, 1286, 1287, 1288, 1289, 1290, 1291, 1292, 1293, 1294, 1295, 1296, 1297, 1298, 1299, 1300, or 1301. In some embodiments, one or more (1, 2, 3, 4, 5, or all 6 CDRs) of the HCDR1, HCDR2, HCDR3, LCDR1, LCDR2, and LCDR3 has one, two, or at most three amino acid substitutions (e.g., conservative substitutions).

[1401] In some embodiments, the anti-tau antibodies described herein comprise a VH and a VL, wherein the VH comprises the HCDR1, HCDR2, and HCDR3 combinations described in Table 2. In some embodiments, the anti-tau antibodies described herein comprise a VH and a VL, wherein the VL comprises the LCDR1, LCDR2, and LCDR3 combinations described in Table 2. In some embodiments, one or more (1, 2, or all 3) of the HCDR1, HCDR2, and HCDR3, and/or one or more (1, 2, or all 3) of the LCDR1, LCDR2, and LCDR3 has one, two, or at most three amino acid substitutions (e.g., conservative substitutions).

TABLE 2
Variable domain CDR amino acid sequence sets

| | | CDR1 | CDR2 | CDR3 | | | CDR1 | | CDR3 |
|---|---|---|---|---|---|---|---|---|---|
| | Variable | SEQ | SEQ | SEQ | | Variable | SEQ | | SEQ |
| ID# | domain | ID NO | ID NO | ID NO | ID# | domain | ID NO | CDR2 | ID NO |
| VY003 | VH | 77 | 92 | 109 | VY003 | VL | 127 | KIS | 1284 |
| VY016 | VH | 78 | 93 | 110 | VY016 | VL | 128 | GNS | 1285 |
| VY007 | VH | 79 | 94 | 111 | VY007 | VL | 127 | KIS | 1286 |
| VY004 | VH | 80 | 95 | 112 | VY004 | VL | 129 | DVS | 1287 |
| VY017 | VH | 78 | 96 | 113 | VY017 | VL | 130 | DAS | 1288 |
| VY006 | VH | 81 | 94 | 114 | VY006 | VL | 127 | KIS | 1286 |
| VY011 | VH | 82 | 97 | 115 | VY011 | VL | 127 | KIS | 1289 |
| VY012 | VH | 83 | 98 | 116 | VY012 | VL | 131 | DDS | 1290 |
| VY009 | VH | 84 | 99 | 117 | VY009 | VL | 132 | KDT | 1291 |
| VY010 | VH | 85 | 100 | 118 | VY010 | VL | 133 | KVS | 1292 |
| VY022 | VH | 85 | 100 | 118 | VY022 | VL | 134 | YKSD | 1293 |
| | | | | | | | | SDK | |
| | | | | | | | | (SEQ | |
| | | | | | | | | ID | |
| | | | | | | | | NO: | |
| | | | | | | | | 1283) | |
| VY018 | VH | 82 | 101 | 119 | VY018 | VL | 132 | KDS | 1294 |
| VY001 | VH | 86 | 102 | 120 | VY001 | VL | 127 | KIS | 1286 |
| VY019 | VH | 87 | 103 | 121 | VY019 | VL | 132 | KDS | 1295 |
| VY020 | VH | 78 | 104 | 122 | VY020 | VL | 135 | DVS | 1296 |
| VY005 | VH | 78 | 104 | 122 | VY005 | VL | 136 | AAS | 1297 |
| VY002 | VH | 88 | 105 | 123 | VY002 | VL | 1279 | WAS | 1298 |
| VY014 | VH | 89 | 106 | 124 | VY014 | VL | 1280 | LGS | 1299 |
| VY008 | VH | 90 | 107 | 125 | VY008 | VL | 1281 | WAS | 1300 |
| VY013 | VH | 91 | 108 | 126 | VY013 | VL | 1282 | VGS | 1301 |

[1402] In some embodiments, anti-tan antibodies of the present disclosure include pairs of variable domain CDR amino acid sequence sets presented herein. In some embodiments, anti-tau antibodies of the present disclosure include variable domain CDR amino acid sequence set pairs presented in Table 3.

TABLE 3
Variable domain CDR amino acid sequence set pairs

| | HCDR1 | HCDR2 | HCDR3 | LCDR1 | | LCDR3 |
|---|---|---|---|---|---|---|
| | SEQ | SEQ | SEQ | SEQ | | SEQ |
| ID# | ID NO | ID NO | ID NO | ID NO | LCDR2 | ID NO |
| VY003 | 77 | 92 | 109 | 127 | KIS | 1284 |
| VY016 | 78 | 93 | 110 | 128 | GNS | 1285 |
| VY007 | 79 | 94 | 111 | 127 | KIS | 1286 |
| VY004 | 80 | 95 | 112 | 129 | DVS | 1287 |
| VY017 | 78 | 96 | 113 | 130 | DAS | 1288 |
| VY006 | 81 | 94 | 114 | 127 | KIS | 1286 |
| VY011 | 82 | 97 | 115 | 127 | KIS | 1289 |
| VY012 | 83 | 98 | 116 | 131 | DDS | 1290 |
| VY009 | 84 | 99 | 117 | 132 | KDT | 1291 |
| VY010 | 85 | 100 | 118 | 133 | KVS | 1292 |
| VY022 | 85 | 100 | 118 | 134 | YKSDSDK | 1293 |
| | | | | | (SEQ ID | |
| | | | | | NO: 1283) | |
| VY018 | 82 | 101 | 119 | 132 | KDS | 1294 |
| VY001 | 86 | 102 | 120 | 127 | KIS | 1286 |
| VY019 | 87 | 103 | 121 | 132 | KDS | 1295 |
| VY020 | 78 | 104 | 122 | 135 | DVS | 1296 |
| VY005 | 78 | 104 | 122 | 136 | AAS | 1297 |
| VY002 | 88 | 105 | 123 | 1279 | WAS | 1298 |
| VY014 | 89 | 106 | 124 | 1280 | LGS | 1299 |
| VY008 | 90 | 107 | 125 | 1281 | WAS | 1300 |
| VY013 | 91 | 108 | 126 | 1282 | VGS | 1301 |

[1403] Provided herein are isolated, e.g., recombinant, antibodies that bind to human tau, wherein the antibody comprises a VH comprising one, two, or all three of a heavy chain complementary determining region 1 (HCDR1), a heavy chain complementary determining region 2 (HCDR2), and a heavy chain complementary determining region 3 (HCDR3), and/or a VL comprising one, two, or all three of a light chain complementary determining region 1 (LCDR1), a light chain complementary determining region 2 (LCDR2), and a light chain complementary determining region 3 (LCDR3), wherein: (i) the HCDR1, HCDR2, HCDR3, LCDR1, LCDR2, and LCDR3 comprise the amino acid sequences of SEQ ID NO: 82, SEQ ID NO: 97, SEQ ID NO: 115, SEQ ID NO: 127, KIS, and SEQ ID NO: 1289, respectively; (ii) the HCDR1, HCDR2, HCDR3, LCDR1, LCDR2, and LCDR3 comprise the amino acid sequences of SEQ ID NO: 79, SEQ ID NO: 94, SEQ ID NO: 111, SEQ ID NO: 127, KIS, and SEQ ID NO: 1286, respectively; (iii) the HCDR1, HCDR2, HCDR3, LCDR1, LCDR2, and LCDR3 comprise the amino acid sequences of SEQ ID NO: 80, SEQ ID NO: 95, SEQ ID NO: 112, SEQ ID NO: 129, DVS, and SEQ ID NO: 1287, respectively; (iv) the HCDR1, HCDR2, HCDR3, LCDR1, LCDR2, and LCDR3 comprise the amino acid sequences of SEQ ID NO: 81, SEQ ID NO: 94, SEQ ID NO: 114, SEQ ID NO: 127, KIS, and SEQ ID NO: 1286, respectively; (v) the HCDR1, HCDR2, HCDR3, LCDR1, LCDR2, and LCDR3 comprise the amino acid sequences of SEQ ID NO: 82, SEQ ID NO: 101, SEQ ID NO: 119, SEQ ID NO: 132, KDS, and SEQ ID NO: 1294, respectively; (vi) the HCDR1, HCDR2, HCDR3, LCDR1, LCDR2, and LCDR3 comprise the amino acid sequences of SEQ ID NO: 77, SEQ ID NO: 92, SEQ ID NO: 109, SEQ ID NO: 127, KIS, and SEQ ID NO: 1284, respectively; (vii) the HCDR1, HCDR2, HCDR3, LCDR1, LCDR2, and LCDR3 comprise the amino acid sequences of SEQ ID NO: 78, SEQ ID NO: 93, SEQ ID NO: 110, SEQ ID NO: 128, GNS, and SEQ ID NO: 1285, respectively; (viii) the HCDR1, HCDR2, HCDR3, LCDR1, LCDR2, and LCDR3 comprise the amino acid sequences of SEQ ID NO: 78, SEQ ID NO: 96, SEQ ID NO: 113, SEQ ID NO: 130, DAS, and SEQ ID NO: 1288, respectively; (xi) the HCDR1, HCDR2, HCDR3, LCDR1, LCDR2, and LCDR3 comprise the amino acid sequences of SEQ ID NO: 83, SEQ ID NO: 98, SEQ ID NO: 116, SEQ ID NO: 131, DDS, and SEQ ID NO: 1290, respectively; (x) the HCDR1, HCDR2, HCDR3, LCDR1, LCDR2, and LCDR3 comprise the amino acid sequences of SEQ ID NO: 84, SEQ ID NO: 99, 117, 132, KDT, and 1291, respectively; (xi) the HCDR1, HCDR2, HCDR3, LCDR1, LCDR2, and LCDR3 comprise the amino acid sequences of SEQ ID NO: 85, SEQ ID NO: 100, SEQ ID NO: 118, SEQ ID NO: 133, KVS, and SEQ ID NO: 1292, respectively; (xii) the HCDR1, HCDR2, HCDR3, LCDR1, LCDR2, and LCDR3 comprise the amino acid sequences of SEQ ID NO: 85, SEQ ID NO: 100, SEQ ID NO: 118, SEQ ID NO: 134, 1283, and SEQ ID NO: 1293, respectively; (xiii) the HCDR1, HCDR2, HCDR3, LCDR1, LCDR2, and LCDR3 comprise the amino acid sequences of SEQ ID NO: 86, SEQ ID NO: 102, SEQ ID NO: 120, SEQ ID NO: 127, KIS, and SEQ ID NO: 1286, respectively; (xiv) the HCDR1, HCDR2, HCDR3, LCDR1, LCDR2, and LCDR3 comprise the amino acid sequences of SEQ ID NO: 87, SEQ ID NO: 103, SEQ ID NO: 121, SEQ ID NO: 132, KDS, and SEQ ID NO: 1295, respectively; (xv) the HCDR1, HCDR2, HCDR3, LCDR1, LCDR2, and LCDR3 comprise the amino acid sequences of SEQ ID NO: 78, SEQ ID NO: 104, SEQ ID NO: 122, SEQ ID NO: 135, DVS, and SEQ ID NO: 1296, respectively; (xvi) the HCDR1, HCDR2, HCDR3, LCDR1, LCDR2, and LCDR3 comprise the amino acid sequences of SEQ ID NO: 78, SEQ ID NO: 104, SEQ ID NO: 122, SEQ ID NO: 136, AAS, and SEQ ID NO: 1297, respectively; (xvii) the HCDR1, HCDR2, HCDR3, LCDR1, LCDR2, and LCDR3 comprise the amino acid sequences of SEQ ID NO: 88, SEQ ID NO: 105, SEQ ID NO: 123, SEQ ID NO: 1279, WAS, and SEQ ID NO: 1298, respectively; (xviii) the HCDR1, HCDR2, HCDR3, LCDR1, LCDR2, and LCDR3 comprise the amino acid sequences of SEQ ID NO: 89, SEQ ID NO: 106, SEQ ID NO: 124, SEQ ID NO: 1280, LGS, and SEQ ID NO: 1299, respectively; (xix) the HCDR1, HCDR2, HCDR3, LCDR1, LCDR2, and LCDR3 comprise the amino acid sequences of SEQ ID NO: 90, SEQ ID NO: 107, SEQ ID NO: 125, SEQ ID NO: 1281, WAS, and SEQ ID NO: 1300, respectively; or (xx) the HCDR1, HCDR2, HCDR3, LCDR1, LCDR2, and LCDR3 comprise the amino acid sequences of SEQ ID NO: 91, SEQ ID NO: 108, SEQ ID NO: 126, SEQ ID NO: 1282, VGS, and SEQ ID NO: 1301, respectively.

[1404] In some embodiments, the antibody comprises the HCDR1, HCDR2, and HCDR3 sequences of any one of (i)-(xx). In some embodiments, the antibody comprises the LCDR1, LCDR2, and LCDR3 sequences of any one of (i)-(xx). In some embodiments, the antibody comprises the HCDR1, HCDR2, HCDR3, LCDR1, LCDR2, and LCDR3 sequences of any one of (i)-(xx).

[1405] In some embodiments, one or more (1, 2, 3, 4, 5, or all 6 CDRs) of the HCDR1, HCDR2, HCDR3, LCDR1, LCDR2, and LCDR3 of the antibodies of (i)-(xx) has one, two, or at most three amino acid substitutions (e.g., conservative substitutions).

[1406] In some embodiments, anti-tau antibodies of the present disclosure include one or more framework regions (FRs). FRs may include amino acid sequences derived from variable domain amino acid sequences provided in Table 1. FRs may be encoded by nucleic acid sequences derived from one or more variable domain nucleic acid sequences provided in Table 1. In some embodiments, anti-tau antibody FRs may include amino acid sequences according to any of those presented in Table 1, or fragments thereof. In some embodiments, anti-tau antibodies of the present disclosure include FRs that include amino acid sequence variants of those listed. Amino acid fragments or variants included in anti-tau antibody FRs may include from about 50% to about 99.9% sequence identity (e.g. from about 50% to about 60%, from about 55% to about 65%, from about 60% to about 70%, from about 65% to about 75%, from about 70% to about 80%, from about 75% to about 85%, from about 80% to about 90%, from about 85% to about 95%, from about 90% to about 99.9%, from about 95% to about 99.9%, about 97%, about 97.5%, about 98%, about 98.5%, about 99%, about 99.5%, about 99.6%, about 99.7% or about 99.8%) with one or more of the amino acid sequences listed. In some embodiments, the FRs have at least 50%, 55%, 60%, 65%, 70%, 75%, 80%, 85%, 90%, 92%, 95%, 96%, 97%, 98%, or 99% sequence identity to the FR sequences listed in Table 1, or have at least one, two, or three modifications, but not more than 30, 20, or 10 modifications (e.g., 1-30, 1-20, 1-10, 1-5, 1-4, 1-3, 1-2, or 1 amino acid modifications, such as amino acid substitutions (e.g., conservative substitutions)), relative to the FRs listed in Table 1.

[1407] Also provided herein are anti-tau antibodies which bind to tau protein antigens. Tau protein antigens may include human microtubule-associated protein tau, isoform 2 (SEQ ID NO: 1404) or fragments thereof. Tau protein antigens may include ePHF or fragments thereof. Tau protein antigens may include one or more phosphorylated residues. Such phosphorylated residues may correspond to those found with pathological tau. In some embodiments tau protein antigens include any of those listed in Table 4. In the Table, phosphorylated residues associated with each antigen are denoted as (pS) for a phosphorylated serine and (pT) for phosphorylated threonine. In some embodiments, tau proteins may include variants (e.g., phosphorylated or unphosphorylated variants) or fragments of the sequences listed.

TABLE 4
Exemplary tau protein antigen sequences

| | | SEQ |
|---|---|---|
| | | ID |
| Antigen | Sequence | NO |
| human | MAEPRQEFEVMEDHAGTYGLGD | 1404 |
| microtubule- | RKDQGGYTMHQDQEGDTDAGLK | |
| associated | ESPLQTPTEDGSEEPGSETSDA | |
| protein tau, | KSTPTAEDVTAPLVDEGAPGKQ | |
| isoform 2 | AAAQPHTEIPEGTTAEEAGIGD | |
| | TPSLEDEAAGHVTQARMVSKSK | |
| | DGTGSDDKKAKGADGKTKIATP | |
| | RGAAPPGQKGQANATRIPAKTP | |
| | PAPKTPPSSGEPPKSGDRSGYS | |
| | SPGSPGTPGSRSRTPSLPTPPT | |
| | REPKKVAVVRTPPKSPSSAKSR | |
| | LQTAPVPMPDLKNVKSKIGSTE | |
| | NLKHQPGGGKVQIINKKLDLSN | |
| | VQSKCGSKDNIKHVPGGGSVQI | |
| | VYKPVDLSKVTSKCGSLGNIHH | |
| | KPGGGQVEVKSEKLDFKDRVQS | |
| | KIGSLDNITHVPGGGNKKIETH | |
| | KLTFRENAKAKTDHGAEIVYKS | |
| | PVVSGDTSPRHLSNVSSTGSID | |
| | MVDSPQLATLADEVSASLAKQG | |
| | L | |
| PT3 epitope | TPGSRSR(pT)PSLP(pT)PPT | 1405 |
| peptide | REPK | |
| (pT212/pT217) | | |
| Peptide 5 | GTPGSRSR(pT)P(pS)LP | 1406 |
| (tPeptide 5) | (pT)PPTRE | |
| (pT212/pS214/ | | |
| pT217) | | |
| Peptide 12 | RENAKAKTDHGAEIVYK(pS) | 1407 |
| (pS396/pS404/ | PVVSGDT(pS)PRHL(pS)NV | |
| pS409) | SSTG | |
| Peptide 1 | PTREPKKV | 1408 |
| (AT120 | | |
| epitope) | | |
| 6C5 epitope | ARMVSKS | 1409 |
| peptide | | |
| UCB D & PT76 | SPSSAKSRLQTAPVPMPDLKNV | 1410 |
| epitope | KS | |
| peptide | | |
| Tau(pS404) | DHGAEIVYKSPVVSGDT(pS) | 1411 |
| | PRHLSNVSSTG | |
| AC04 peptide | CSR(PT)PSLP(pT)PPTREPK | 1412 |
| PepScan | DR(pS)GY(pS)(pS)PG(pS) | 1413 |
| 193-210 | PG(pT)PG(pS)R(pS) | |
| peptide | | |
| Tau191-214 | SGDRSGYS(pS)PGSPGTPGS | 1414 |
| phospho- | RSRTPS | |
| peptide | | |
| (pS199) | | |
| Tau191-214 | SGDRSGYSSPG(pS)PGTPGS | 1415 |
| phospho- | RSRTPS | |
| peptide | | |
| (pS202) | | |
| Tau191-214 | SGDRSGYSSPGSPG(pT)PGS | 1416 |
| phospho- | RSRTPS | |
| peptide | | |
| (pT205) | | |
| Tau191-214 | SGDRSGYSpSPG(pS)PG | 1417 |
| phospho- | (pT)PGSRSRTPS | |
| peptide | | |
| (pS199/ | | |
| pS202/pT205) | | |
| Tau191-214 | SGDRSGYS(pS)PG(pS) | 1418 |
| phospho- | PGTPGSRSRTPS | |
| peptide | | |
| (pS199/pS202) | | |
| Tau191-214 | SGDRSGYSSPG(pS)PG | 1419 |
| phospho- | (pT)PGSRSRTPS | |
| peptide | | |
| (pS202/pT205) | | |
| Tau191-214 | SGDRSGYS(pS)PGSPG | 1420 |
| phospho- | (pT)PGSRSRTPS | |
| peptide | | |
| (pS199/pT205) | | |
| Tau204-222 | GTPGSRSR(pT)PSLPTPPTR | 1421 |
| phospho- | E | |
| peptide | | |
| (pT212) | | |
| Tau204-222 | GTPGSRSRTP(pS)LPTPPTR | 1422 |
| phospho- | E | |
| peptide | | |
| (pS214) | | |
| Tau204-222 | GTPGSRSRTPSLP(pT)PPTR | 1423 |
| phospho- | E | |
| peptide | | |
| (pT217) | | |
| Tau204-222 | GTPGSRSR(pT)P(pS)LPTP | 1424 |
| phospho- | PTRE | |
| peptide | | |
| (pT212/pS214) | | |
| Tau204-222 | GTPGSRSR(pT)PSLP(pT) | 1425 |
| phospho- | PPTRE | |
| peptide | | |
| (pT212/pT217) | | |
| Tau204-222 | GTPGSRSRTP(pS)LP(pT) | 1426 |
| phospho- | PPTRE | |
| peptide | | |
| (pS214/pT217) | | |
| Tau204-222 | GTPGSRSR(pT)P(pS)LP | 1427 |
| phospho- | (pT)PPTRE | |
| peptide | | |
| (pT212/ | | |
| pS214/pT217) | | |
| Tau217-234 | (pT)PP(pT)REPKKVAVVR | 1428 |
| phospho- | (pT)PPK | |
| peptide | | |
| (pT217/ | | |
| pT220/pT231) | | |
| Tau225-240 | KVAVVR(pT)PPKSPSSAK | 1429 |
| phospho- | | |
| peptide | | |
| (pT231) | | |
| Tau | KVAVVRTPPK(pS)PSSAKPS | 1430 |
| phospho- | | |
| peptide | | |
| (pS235) | | |
| Tau | KVAVVR(pT)PPK(pS)PSSAK | 1431 |
| phospho- | PS | |
| peptide | | |
| (pT231/pS235) | | |

[1408] In some embodiments, anti-tau antibodies of the present disclosure bind to tau protein epitopes on tau protein antigens described herein. Such tau protein epitopes may include or be included within a tau protein antigen amino acid sequence listed in Table 4. In some embodiments, anti-tau antibodies of the present disclosure bind to tau protein epitopes that include a region formed by a complex of at least two tau proteins.

[1409] In some embodiments, anti-tau antibodies of the present disclosure exhibit binding that overlaps with a region of tau recognized by art-recognized antibodies, such as AT8 and PT3, but exhibit binding patterns to phosphorylated tau that differs from the art-recognized antibodies.

[1410] Accordingly, in one aspect, provided herein is an isolated, e.g., recombinant, antibody that binds to human tau, wherein the antibody binds to all or a portion of amino acid residues of tau selected from: (a) 183-212, (b) 187-218, (c) 33-82, 159-182, 197-226, and 229-246; (d) 217-242, (e) 35-76 and 187-218, (f) 5-34, (g) 187-218, (h) 33-82, 159-188, and 191-230, (i) 35-62, 107-124, and 203-220, (j) 35-82, 159-188, and 197-224, or (k) 53-78, 329-348, and 381-408, wherein human tau is numbered according to SEQ ID NO: 1404. In some embodiments, one or more of the serines, threonines, and/or tyrosines in the stretch of amino acids selected from (a)-(k) are phosphorylated. In some embodiments, all of the serines, threonines, and/or tyrosines in the stretch of amino acids selected from (a)-(k) are phosphorylated. In some embodiments, the antibody comprises the HCDR1, HCDR2, HCDR3, LCDR1, LCDR2, and LCDR3 sequences, or the VH and VL sequences, of an antibody listed in Table 1.

[1411] In some embodiments, the anti-tau antibody binds to all or a portion of amino acids 195-215 of human tau (e.g., phosphorylated at all serines, threonines, and/or tyrosines present in this stretch of amino acids) with a dissociation constant (K_{D}) of about 1 pM to about 50 pM, or about 1-25 pM, e.g., as assessed by bio-layer interferometry.

[1412] In some embodiments, the anti-tau antibody binds to all or a portion of amino acids 191-214 of human tau phosphorylated at S199 (e.g., phosphorylated only at S199 in this stretch of amino acids or throughout the entire tau protein) with a dissociation constant (K_{D}) of about 0.1 nM to about 10 nM, or about 0.5-5 nM, e.g., as assessed by bio-layer interferometry.

[1413] In some embodiments, the anti-tau antibody binds to all or a portion of amino acids 217-234 of human tau phosphorylated at T217, T220, and T231 (e.g., phosphorylated only at T217, T220, and T231 in this stretch of amino acids or throughout the entire tau protein) with a dissociation constant (K_{D}) of about 0.1 nM to about 10 nM, or about 0.1-5 nM, e.g., as assessed by bio-layer interferometry.

[1414] In some embodiments, the anti-tau antibody binds to all or a portion of amino acids 225-240 of tau phosphorylated at T231 (e.g., phosphorylated only at T231 in this stretch of amino acids or throughout the entire tau protein) with a dissociation constant (K_{D}) of about 0.1 nM to about 25 nM, or about 0.1-15 nM, e.g., as assessed by bio-layer interferometry.

[1415] In another aspect, provided herein is an isolated, e.g., recombinant, antibody that binds to human tau phosphorylated at amino acid residue S404, or a peptide comprising or consisting of the amino acid sequence DHGAEIVYKSPVVSGDT(pS)PRHLSNVSSTG (SEQ ID NO: 1411), wherein p(S) corresponds to a phosphorylated serine residue. In some embodiments, the antibody comprises a heavy chain variable region (VH) comprising CDR1, CDR2, and CDR3 sequences comprising SEQ ID NOs: 89, 106, and 124, respectively, and a light chain variable region (VL) comprising CDR1, CDR2, and CDR3 sequences comprising SEQ ID NOs: 1280, LGS, and 1299, respectively. In some embodiments, the antibody comprises VH and VL sequences comprising SEQ ID NOs: 16 and 36, respectively.

[1416] In another aspect, provided herein is an isolated, e.g., recombinant, antibody that binds to: (a) human tau phosphorylated at amino acid residue S199, but not at amino acid residues S202 and T205; (b) human tau phosphorylated at amino acid residue S202, but not at amino acid residues S199 and T205; (c) human tau phosphorylated at amino acid residue T205, but not at amino acid residues S199 and S202; (d) human tau phosphorylated at a combination of amino acid residues S199 and T205, but not at amino acid residue S202 (e.g., wherein binding tau phosphorylated at a combination of S199 and T205 is at least 3-times stronger (e.g., at least 4-time stronger) than background (e.g., non-specific) level of binding, e.g., binding by hIgG1 isotype control); (e) human tau phosphorylated at a combination of amino acid residues S202 and T205, but not at amino acid residue S199, but not human tau phosphorylated at a combination of residues S199 and S202, but not T205; (f) human tau phosphorylated at a combination of amino acid residues: (i) S202 and T205, but not S119, and (ii) S199 and T205, but not S202, at least 2 times (e.g., at least 3 times, at least 4 times, at least 5 times, 2-6 times, 2-5 times, 2-4 times, 2-3 times, 3-5 times or 4-5 times) more strongly than background (e.g., non-specific) level of binding, e.g., binding by hIgG1 isotype control); (g) human tau phosphorylated at a combination of amino acid residues: (i) S199 and S202, but not T205, (ii) S202 and T205, but not S199, (iii) S199 and T205, but not S202, and (iv) S199, S202, and T205 (e.g., wherein binding to phosphorylated tau is at least 1.6-times stronger (e.g., at least 1.7 times, at least 1.8 times, at least 1.9 times, at least 2 times, at least 3 times, 1.6-3 times, 1.6-2 times stronger) than background (e.g., non-specific) level of binding, e.g., binding by hIgG1 isotype control); (h) a peptide comprising or consisting of the amino acid sequence SGDRSGYS(pS)PGSPGTPGSRSRTPS (SEQ ID NO: 1414); (i) a peptide comprising or consisting of the amino acid sequence SGDRSGYSSPG(pS)PGTPGSRSRTPS (SEQ ID NO: 1415); (j) a peptide comprising or consisting of the amino acid sequence SGDRSGYSSPGSPG(pT)PGSRSRTPS (SEQ ID NO: 1416); (k) a peptide comprising or consisting of the amino acid sequence SGDRSGYS(pS)PGSPG(pT)PGSRSRTPS (SEQ ID NO: 1420) (e.g., wherein binding to the peptide is at least 3 times stronger (e.g., at least 4 times stronger) than background (e.g., non-specific) level of binding, e.g., binding by hIgG1 isotype control); (1) a peptide comprising or consisting of the amino acid sequence SGDRSGYSSPG(pS)PG(pT)PGSRSRTPS (SEQ ID NO: 1419), but not a peptide comprising or consisting of the amino acid sequence SGDRSGYS(pS)PG(pS)PGTPGSRSRTPS (SEQ ID NO: 1418); (m) peptides comprising or consisting of the amino acid sequences SGDRSGYSSPG(pS)PG(pT)PGSRSRTPS (SEQ ID NO: 1419) and SGDRSGYS(pS)PGSPG(pT)PGSRSRTPS (SEQ ID NO: 1420); wherein binding to the latter peptide is at least 2 times (e.g., at least 3 times, at least 4 times, at least 5 times, 2-6 times, 2-5 times, 2-4 times, 2-3 times, 3-5 times or 4-5 times) stronger than background (e.g., non-specific) level of binding, e.g., binding by hIgG1 isotype control); or (n) peptides comprising or consisting of the amino acid sequences SGDRSGYS(pS)PG(pS)PGTPGSRSRTPS (SEQ ID NO: 1418), SGDRSGYSSPG(pS)PG(pT)PGSRSRTPS (SEQ ID NO: 1419), SGDRSGYS(pS)PGSPG(pT)PGSRSRTPS (SEQ ID NO: 1420), and SGDRSGYS(pS)PG(pS)PG(pT)PGSRSRTPS (SEQ ID NO: 1417) (e.g., wherein binding to the peptides is at least 1.6 times stronger (e.g., at least 1.7 times, at least 1.8 times, at least 1.9 times, at least 2 times, at least 3 times, 1.6-4 times, 1.6-3 times stronger) than background (e.g., non-specific) level of binding, e.g., binding by hIgG1 isotype control); wherein p(S) and p(T) correspond to a phosphorylated serine and phosphorylated threonine, respectively, optionally wherein binding is assessed, e.g., using one point ELISA as described in Example 7. In some embodiments, the antibody comprises (a) a heavy chain variable region (VH) comprising CDR1, CDR2, and CDR3 sequences comprising SEQ ID NOs: 82, 97, and 115, respectively, and a light chain variable region (VL) comprising CDR1, CDR2, and CDR3 sequences comprising SEQ ID NO: 127, KIS, and SEQ ID NO: 1289, respectively; (b) a heavy chain variable region (VH) comprising CDR1, CDR2, and CDR3 sequences comprising SEQ ID NOs: 79, 94, and 111, respectively, and a light chain variable region (VL) comprising CDR1, CDR2, and CDR3 sequences comprising SEQ ID NO: 127, KIS, and SEQ ID NO: 1286, respectively; (c) a heavy chain variable region (VH) comprising CDR1, CDR2, and CDR3 sequences comprising SEQ ID NOs: 81, 94, and 114, respectively, and a light chain variable region (VL) comprising CDR1, CDR2, and CDR3 sequences comprising SEQ ID NO: 127, KIS, and SEQ ID NO: 1286, respectively; (d) a heavy chain variable region (VH) comprising CDR1, CDR2, and CDR3 sequences comprising SEQ ID NOs: 77, 92, and 109, respectively, and a light chain variable region (VL) comprising CDR1, CDR2, and CDR3 sequences comprising SEQ ID NO: 127, KIS, and SEQ ID NO: 1284, respectively; (e) a heavy chain variable region (VH) comprising CDR1, CDR2, and CDR3 sequences comprising SEQ ID NOs: 86, 102, and 120, respectively, and a light chain variable region (VL) comprising CDR1, CDR2, and CDR3 sequences comprising SEQ ID NO: 127, KIS, and SEQ ID NO: 1286, respectively; (f) VH and VL sequences comprising SEQ ID NOs: 1143 and 25, respectively; (g) VH and VL sequences comprising SEQ ID NOs: 1144 and 26, respectively; (h) VH and VL sequences comprising SEQ ID NOs: 1142 and 24, respectively; (i) VH and VL sequences comprising SEQ ID NOs: 1 and 19, respectively; or (j) VH and VL sequences comprising SEQ ID NOs: 12 and 31, respectively.

[1417] In another aspect, provided herein is an isolated, e.g., recombinant, antibody that binds to: (a) tau phosphorylated at T217, but not at T212 or T214, or (b) peptides comprising or consisting of the sequences GTPGSRSRTPSLP(pT)PPTRE (SEQ ID NO: 1423) and GTPGSRSRTP(pS)LP(pT)PPTRE (SEQ ID NO: 1426), but not peptides comprising or consisting of the sequences GTPGSRSR(pT)PSLPTPPTRE (SEQ ID NO: 1421), GTPGSRSRTP(pS)LPTPPTRE (SEQ ID NO: 1422), and GTPGSRSR(pT)P(pS)LPTPPTRE (SEQ ID NO: 1424), wherein p(S) and p(T) correspond to a phosphorylated serine and phosphorylated threonine, respectively, optionally wherein binding of the antibody to tau or the peptide is at least 1.5 times stronger (e.g., at least 1.6 times, at least 1.7 times, at least 1.8 times, at least 1.9 times, at least 2 times, at least 3 times, at least 4 times, at least 5 times, at least 6 times, 1.5-4 times, 1.5-3, 4-6 times stronger) than background (non-specific) level of binding, e.g., binding by hIgG1 isotype control), and optionally wherein binding of the antibody to tau or the peptide is assessed, e.g., using one point ELISA as described, e.g., in Example 8. In some embodiments, the antibody comprises: (a) a heavy chain variable region (VH) comprising CDR1, CDR2, and CDR3 sequences comprising SEQ ID NOs: 80, 95, and 112, respectively, and a light chain variable region (VL) comprising CDR1, CDR2, and CDR3 sequences comprising SEQ ID NO: 129, DVS, and 1287, respectively; (b) a heavy chain variable region (VH) comprising CDR1, CDR2, and CDR3 sequences comprising SEQ ID NOs: 78, 104, and 122, respectively, and a light chain variable region (VL) comprising CDR1, CDR2, and CDR3 sequences comprising SEQ ID NO: 136, AAS, and SEQ ID NO: 1297, respectively; (c) a heavy chain variable region (VH) comprising CDR1, CDR2, and CDR3 sequences comprising SEQ ID NOs: 90, 107, and 125, respectively, and a light chain variable region (VL) comprising CDR1, CDR2, and CDR3 sequences comprising SEQ ID NO: 1281, WAS, and SEQ ID NO: 1300, respectively; (d) VH and VL sequences comprising SEQ ID NOs: 1140 and 22, respectively; (e) VH and VL sequences comprising SEQ ID NOs: 14 and 34, respectively; or (f) VH and VL sequences comprising SEQ ID NOs: 17 and 37, respectively.

[1418] Specific binding to the aforementioned recited phosphorylated residues or peptides can be determined by comparison with the background level of binding of the assay (e.g., one point ELISA) or level of binding by a negative control, such as an isotype control antibody (e.g., a human IgG1 isotype control antibody), for example, as described in the Examples.

[1419] In some embodiments, provided herein are anti-tau antibodies which compete for binding to human tau, or human tau peptides, with any of the anti-tau antibodies described herein.

[1420] Also provided herein are anti-tau antibodies which exhibit similar epitope binding features, such as the ability to bind to phospho-epitopes on human tau, as the anti-tau antibodies described herein. Accordingly, in some embodiments, provided herein hare antibodies which bind to the same epitope (e.g., phospho-epitope), substantially the same epitope as, an epitope that overlaps with, or an epitope that substantially overlaps with, the epitope recognized by an anti-tau antibody described herein. In some embodiments, the antibodies described herein bind to a discontinuous epitope, such as a conformational epitope.

[1421] Exemplary methods for determining whether an antibody binds to the same epitope (or substantially the same epitope, an epitope that overlaps with, or an epitope that substantially overlaps with) on human tau with the antibodies described herein include, e.g., epitope mapping methods such as x-ray analyses of crystals of antigen:antibody complexes which provides atomic resolution of the epitope. Other methods monitor the binding of the antibody to antigen fragments or mutated variations of the antigen where loss of binding due to a modification of an amino acid residue within the antigen sequence is often considered an indication of an epitope component. Computational combinatorial methods for epitope mapping can also be used. Methods may also rely on the ability of an antibody of interest to affinity isolate specific short peptides (either in native three dimensional form or in denatured form) from combinatorial phage display peptide libraries. Epitope mapping can also be performed using MS-based protein footprinting (e.g., HDX-MS, FPOP). Overlapping phospho-peptide scanning, as described in the Examples, can also be used for epitope mapping.

[1422] Anti-tau antibodies according to the present disclosure may be prepared using any of the antibody sequences (e.g., variable domain amino acid sequences, variable domain amino acid sequence pairs, CDR amino acid sequences, variable domain CDR amino acid sequence sets, variable domain CDR amino acid sequence set pairs, and/or framework region amino acid sequences) presented herein, any may be prepared, for example, as monoclonal antibodies, multispecific antibodies, chimeric antibodies, antibody mimetics, scFvs, or antibody fragments. In some embodiments, anti-tau antibodies using any of the antibody sequences presented herein may be prepared as IgA, IgD, IgE, IgG, or IgM antibodies. When prepared as mouse IgG antibodies, anti-tau antibodies may be prepared as IgG1, IgG2a, IgG2b, or IgG3 isotypes. When prepared as human IgG antibodies, anti-tau antibodies may be prepared as IgG1, IgG2, IgG3, or IgG4 isotypes. Anti-tau antibodies prepared as human or humanized antibodies may include one or more human constant domains. Human constant domains included in anti-tau antibodies of the present disclosure may include, but are not limited to, any of those listed in Table 5.

[1423] In some embodiments, the anti-tau antibodies comprise: (i) a heavy chain constant region (CH), e.g., a CH comprising an amino acid sequence of a human CH, such as the CH of human IgG1, IgG2, IgG3, or IgG4 (e.g., a CH described in Table 5) or a murine CH, or a sequence having at least 80% (e.g., 85, 90, 95, 96, 97, 98, or 99%) sequence identity thereto, or an amino acid sequence having at least one, two or three modifications, but not more than 30, 20 or 10 modifications (e.g., 1-30, 1-20, 1-10, 1-5, 1-4, 1-3, 1-2, or 1 amino acid modification, such as a substitution (e.g., a conservative substitution)), relative to the constant region sequence (e.g., a CH described in Table 5); and/or (ii) a light chain constant region (CL), e.g., a CL comprising an amino acid sequence of a human CL, such as the CL of a human lambda or kappa light chain (e.g., a CL described in Table 5) or a murine CL, or a sequence having at least 80% (e.g., 85, 90, 95, 96, 97, 98, or 99%) sequence identity thereto, or an amino acid sequence having at least one, two or three modifications, but not more than 30, 20 or 10 modifications (e.g., 1-30, 1-20, 1-10, 1-5, 1-4, 1-3, 1-2, or 1 amino acid modification, such as a substitution (e.g., a conservative substitution)), relative to the constant region sequence (e.g., a CH described in Table 5).

[1424] In some embodiments, the heavy chain constant region sequence (e.g., human heavy chain constant region sequence) has a C-terminal lysine (K), a C-terminal glycine (G), or a C-terminal glycine and lysine (GK). In some embodiments, the heavy chain constant region sequence (e.g., human heavy chain constant region sequence) lacks the C-terminal lysine (K), C-terminal glycine (G), or C-terminal glycine and lysine (GK).

[1425] In some embodiments, anti-tau antibodies of the present disclosure include constant domains that include amino acid sequence variants and/or fragments of those listed in Table 5. Amino acid fragments or variants included in anti-tau antibody constant domains may include from about 50% to about 99.9% sequence identity (e.g. from about 50% to about 60%, from about 55% to about 65%, from about 60% to about 70%, from about 65% to about 75%, from about 70% to about 80%, from about 75% to about 85%, from about 80% to about 90%, from about 85% to about 95%, from about 90% to about 99.9%, from about 95% to about 99.9%, about 97%, about 97.5%, about 98%, about 98.5%, about 99%, about 99.5%, about 99.6%, about 99.7% or about 99.8%) with one or more of the amino acid sequences listed in Table 5. In some embodiments, the constant domains have at least 50%, 55%, 60%, 65%, 70%, 75%, 80%, 85%, 90%, 92%, 95%, 96%, 97%, 98%, or 99% sequence identity, or at least one, two, or three modifications, but not more than 30, 20, or 10 modifications (e.g., amino acid substitutions, such as conservative substitutions), relative to the amino acid sequences listed in Table 5.

[1426] A VH domain, or one or more CDRs thereof, described herein can be linked to a constant domain to form a heavy chain, e.g., a full length heavy chain. Similarly, a VL domain, or one or more CDRs thereof, described herein can be linked to a constant domain to form a light chain, e.g., a full length light chain. A full length heavy chain (with the exception of the C-terminal lysine (K), with the exception of the C-terminal glycine (G), or with the exception of the C-terminal glycine and lysine (GK), which may be absent) and full length light chain may combine to form a full length antibody.

TABLE 5
Exemplary constant domains

| | | SEQ |
|---|---|---|
| | | ID |
| Constant domain | Sequence | NO |
| Human IgG1 heavy | ASTKGPSVFPLAPSSKSTSGGTAALGCLVKDYFPEPVTVSWNSGALTS | 1401 |
| chain constant | GVHTFPAVLQSSGLYSLSSVVTVPSSSLGTQTYICNVNHKPSNTKVDK | |
| region (1) | KVEPKSCDKTHTCPPCPAPELLGGPSVFLFPPKPKDTLMISRTPEVTC | |
| | VVVDVSHEDPEVKFNWYVDGVEVHNAKTKPREEQYNSTYRVVSVLTVL | |
| | HQDWLNGKEYKCKVSNKALPAPIEKTISKAKGQPREPQVYTLPPSREE | |
| | MTKNQVSLTCLVKGFYPSDIAVEWESNGQPENNYKTTPPVLDSDGSFF | |
| | LYSKLTVDKSRWQQGNVFSCSVMHEALHNHYTQKSLSLSPG | |
| Human IgG1 heavy | ASTKGPSVFPLAPSSKSTSGGTAALGCLVKDYFPEPVTVSWNSGALTS | 1432 |
| chain constant | GVHTFPAVLQSSGLYSLSSVVTVPSSSLGTQTYICNVNHKPSNTKVDK | |
| region (2) | RVEPKSCDKTHTCPPCPAPELLGGPSVFLFPPKPKDTLMISRTPEVTC | |
| | VVVDVSHEDPEVKFNWYVDGVEVHNAKTKPREEQYNSTYRVVSVLIVL | |
| | HQDWLNGKEYKCKVSNKALPAPIEKTISKAKGQPREPQVYTLPPSREE | |
| | MTKNQVSLTCLVKGFYPSDIAVEWESNGQPENNYKTTPPVLDSDGSFF | |
| | LYSKLTVDKSRWQQGNVFSCSVMHEALHNHYTQKSLSLSPG | |
| Human IgG2 heavy | ASTKGPSVFPLAPCSRSTSESTAALGCLVKDYFPEPVTVSWNSGALTS | 1433 |
| chain constant | GVHTFPAVLQSSGLYSLSSVVTVPSSNFGTQTYTCNVDHKPSNTKVDK | |
| region | TVERKCCVECPPCPAPPVAGPSVFLFPPKPKDTLMISRTPEVTCVVVD | |
| | VSHEDPEVQFNWYVDGVEVHNAKTKPREEQFNSTFRVVSVLIVVHQDW | |
| | LNGKEYKCKVSNKGLPAPIEKTISKTKGQPREPQVYTLPPSREEMTKN | |
| | QVSLTCLVKGFYPSDISVEWESNGQPENNYKTTPPMLDSDGSFFLYSK | |
| | LTVDKSRWQQGNVFSCSVMHEALHNHYTQKSLSLSPGK | |
| Human IgG3 heavy | ASTKGPSVFPLAPCSRSTSGGTAALGCLVKDYFPEPVTVSWNSGALTS | 1434 |
| chain constant | GVHTFPAVLQSSGLYSLSSVVTVPSSSLGTQTYTCNVNHKPSNTKVDK | |
| region | RVELKTPLGDTTHTCPRCPEPKSCDTPPPCPRCPEPKSCDTPPPCPRC | |
| | PEPKSCDTPPPCPRCPAPELLGGPSVFLFPPKPKDTLMISRTPEVTCV | |
| | VVDVSHEDPEVQFKWYVDGVEVHNAKTKPREEQYNSTFRVVSVLTVLH | |
| | QDWLNGKEYKCKVSNKALPAPIEKTISKTKGQPREPQVYTLPPSREEM | |
| | TKNQVSLTCLVKGFYPSDIAVEWESSGQPENNYNTTPPMLDSDGSFFL | |
| | YSKLTVDKSRWQQGNIFSCSVMHEALHNRFTQKSLSLSPGK | |
| Human IgG4 heavy | ASTKGPSVFPLAPCSRSTSESTAALGCLVKDYFPEPVTVSWNSGALTS | 1435 |
| chain constant | GVHTFPAVLQSSGLYSLSSVVTVPSSSLGTKTYTCNVDHKPSNTKVDK | |
| region | RVESKYGPPCPSCPAPEFLGGPSVFLFPPKPKDTLMISRTPEVTCVVV | |
| | DVSQEDPEVQFNWYVDGVEVHNAKTKPREEQFNSTYRVVSVLIVLHQD | |
| | WLNGKEYKCKVSNKGLPSSIEKTISKAKGQPREPQVYTLPPSQEEMTK | |
| | NQVSLTCLVKGFYPSDIAVEWESNGQPENNYKTTPPVLDSDGSFFLYS | |
| | RLTVDKSRWQEGNVFSCSVMHEALHNHYTQKSLSLSLGK | |
| Human IgG1 lambda | GQPKANPTVTLFPPSSEELQANKATLVCLISDFYPGAVTVAWKADGSP | 1436 |
| light chain | VKAGVETTKPSKQSNNKYAASSYLSLTPEQWKSHRSYSCQVTHEGSTV | |
| constant region | EKTVAPTECS | |
| (subclass 1) | | |
| Human IgG1 lambda | GQPKAAPSVTLFPPSSEELQANKATLVCLISDFYPGAVTVAWKADSSP | 1402 |
| light chain | VKAGVETTTPSKQSNNKYAASSYLSLTPEQWKSHRSYSCQVTHEGSTV | |
| constant region | EKTVAPTECS | |
| (subclass 2) | | |
| Human IgG1 lambda | GQPKAAPSVTLFPPSSEELQANKATLVCLISDFYPGAVTVAWKADSSP | 1437 |
| light chain | VKAGVETTTPSKQSNNKYAASSYLSLTPEQWKSHKSYSCQVTHEGSTV | |
| constant region | EKTVAPTECS | |
| (subclass 3) | | |
| Human IgG1 lambda | GQPKAAPSVTLFPPSSEELQANKATLVCLISDFYPGAVKVAWKADGSP | 1438 |
| light chain | VNTGVETTTPSKQSNNKYAASSYLSLTPEQWKSHRSYSCQVTHEGSTV | |
| constant region | EKTVAPAECS | |
| (subclass 6) | | |
| Human IgG1 lambda | GQPKAAPSVTLFPPSSEELQANKATLVCLVSDENPGAVTVAWKADGSP | 1439 |
| light chain | VKVGVETTKPSKQSNNKYAASSYLSLTPEQWKSHRSYSCRVTHEGSTV | |
| constant region | EKTVAPAECS | |
| (subclass 7) | | |
| Human IgG1 kappa | RTVAAPSVFIFPPSDEQLKSGTASVVCLLNNFYPREAKVQWKVDNALQ | 1403 |
| light chain | SGNSQESVTEQDSKDSTYSLSSTLTLSKADYEKHKVYACEVTHQGLSS | |
| constant region | PVTKSENRGEC | |
| Murine mIgG1 | AKTTPPSVYPLAPGSAAQTNSMVTLGCLVKGYFPEPVTVTWNSGSLSS | 1440 |
| heavy chain | GVHTFPAVLQSDLYTLSSSVTVPSSPRPSETVTCNVAHPASSTKVDKK | |
| constant region | IVPRDCGCKPCICTVPEVSSVFIFPPKPKDVLTITLTPKVTCVVVDIS | |
| (secreted form) | KDDPEVQFSWFVDDVEVHTAQTQPREEQFNSTFRSVSELPIMHQDWLN | |
| | GKEFKCRVNSAAFPAPIEKTISKTKGRPKAPQVYTIPPPKEQMAKDKV | |
| | SLTCMITDFFPEDITVEWQWNGQPAENYKNTQPIMNTNGSYFVYSKLN | |
| | VQKSNWEAGNTFTCSVLHEGLHNHHTEKSLSHSPGK | |
| Murine mIgG1 | AKTTPPSVYPLAPGSAAQTNSMVTLGCLVKGYFPEPVTVTWNSGSLSS | 1441 |
| heavy chain | GVHTFPAVLQSDLYTLSSSVTVPSSPRPSETVTCNVAHPASSTKVDKK | |
| constant region | IVPRDCGCKPCICTVPEVSSVFIFPPKPKDVLTITLTPKVTCVVVDIS | |
| (membrane-bound | KDDPEVQFSWFVDDVEVHTAQTQPREEQFNSTFRSVSELPIMHQDWLN | |
| form) | GKEFKCRVNSAAFPAPIEKTISKTKGRPKAPQVYTIPPPKEQMAKDKV | |
| | SLTCMITDFFPEDITVEWQWNGQPAENYKNTQPIMNTNGSYFVYSKLN | |
| | VQKSNWEAGNTFTCSVLHEGLHNHHTEKSLSHSPGLQLDETCAEAQDG | |
| | ELDGLWTTITIFISLFLLSVCYSAAVTLFKVKWIFSSVVELKQTLVPE | |
| | YKNMIGQAP | |
| Murine mIgG2a | AKTTAPSVYPLAPVCGDTTGSSVTLGCLVKGYFPEPVTLTWNSGSLSS | 1442 |
| heavy chain | GVHTFPAVLQSDLYTLSSSVTVTSSTWPSQSITCNVAHPASSTKVDKK | |
| constant region | IEPRGPTIKPCPPCKCPAPNLLGGPSVFIFPPKIKDVLMISLSPIVTC | |
| | VVVDVSEDDPDVQISWFVNNVEVHTAQTQTHREDYNSTLRVVSALPIQ | |
| | HQDWMSGKEFKCKVNNKDLPAPIERTISKPKGSVRAPQVYVLPPPEEE | |
| | MTKKQVTLTCMVTDFMPEDIYVEWTNNGKTELNYKNTEPVLDSDGSYF | |
| | MYSKLRVEKKNWVERNSYSCSVVHEGLHNHHTTKSFSRTPGK | |
| Murine mIgG2a | AKTTAPSVYPLVPVCGGTTGSSVTLGCLVKGYFPEPVTLTWNSGSLSS | 1443 |
| heavy chain | GVHTFPALLQSGLYTLSSSVTVTSNTWPSQTITCNVAHPASSTKVDKK | |
| constant region | IEPRVPITQNPCPPHQRVPPCAAPDLLGGPSVFIFPPKIKDVLMISLS | |
| (secreted form) | PMVTCVVVDVSEDDPDVQISWFVNNVEVHTAQTQTHREDYNSTLRVVS | |
| | ALPIQHQDWMSGKEFKCKVNNRALPSPIEKTISKPRGPVRAPQVYVLP | |
| | PPAEEMTKKEFSLTCMITGFLPAEIAVDWTSNGRTEQNYKNTATVLDS | |
| | DGSYFMYSKLRVQKSTWERGSLFACSVVHEVLHNHLTTKTISRSLGK | |
| Murine mIgG2b | KTTPPSVYPLAPGCGDTTGSSVTLGCLVKGYFPESVTVTWNSGSLSSS | 1444 |
| heavy chain | VHTFPALLQSGLYTMSSSVTVPSSTWPSQTVTCSVAHPASSTTVDKKL | |
| constant region | EPSGPISTINPCPPCKECHKCPAPNLEGGPSVFIFPPNIKDVLMISLT | |
| (secreted form) | PKVTCVVVDVSEDDPDVQISWFVNNVEVHTAQTQTHREDYNSTIRVVS | |
| | TLPIQHQDWMSGKEFKCKVNNKDLPSPIERTISKIKGLVRAPQVYILP | |
| | PPAEQLSRKDVSLTCLVVGFNPGDISVEWTSNGHTEENYKDTAPVLDS | |
| | DGSYFIYSKLNMKTSKWEKTDSFSCNVRHEGLKNYYLKKTISRSPGLD | |
| | LDDICAEAKDGELDGLWTTITIFISLFLLSVCYSASVTLFKVKWIFSS | |
| | VVELKQKISPDYRNMIGQGA | |
| Murine mIgG2b | KTTAPSVYPLAPVCGGTTGSSVTLGCLVKGYFPEPVTLTWNSGSLSSG | 1445 |
| heavy chain | VHTFPALLQSGLYTLSSSVTVTSNTWPSQTITCNVAHPASSTKVDKKI | |
| constant region | EPRVPITQNPCPPLKECPPCAAPDLLGGPSVFIFPPKIKDVLMISLSP | |
| | MVTCVVVDVSEDDPDVQISWFVNNVEVHTAQTQTHREDYNSTLRVVSA | |
| | LPIQHQDWMSGKEFKCKVNNRALPSPIEKTISKPRGPVRAPQVYVLPP | |
| | PAEEMTKKEFSLTCMITGFLPAEIAVDWTSNGRTEQNYKNTATVLDSD | |
| | GSYFMYSKLRVQKSTWERGSLFACSVVHEGLHNHLTTKTISRSLGLDL | |
| | DDVCTEAQDGELDGLWTTITIFISLFLLSVCYSASVTLFKVKWIFSSV | |
| | VELKQKISPDYRNMIGQGA | |
| Murine mIgG3 | TTTAPSVYPLVPGCSDTSGSSVTLGCLVKGYFPEPVTVKWNYGALSSG | 1446 |
| heavy chain | VRTVSSVLQSGFYSLSSLVTVPSSTWPSQTVICNVAHPASKTELIKRI | |
| constant region | EPRIPKPSTPPGSSCPPGNILGGPSVFIFPPKPKDALMISLTPKVTCV | |
| (secreted form) | VVDVSEDDPDVHVSWFVDNKEVHTAWTQPREAQYNSTFRVVSALPIQH | |
| | QDWMRGKEFKCKVNNKALPAPIERTISKPKGRAQTPQVYTIPPPREQM | |
| | SKKKVSLTCLVTNFFSEAISVEWERNGELEQDYKNTPPILDSDGTYFL | |
| | YSKLTVDTDSWLQGEIFTCSVVHEALHNHHTQKNLSRSPELELNETCA | |
| | EAQDGELDGLWTTITIFISLFLLSVCYSASVTLFKVKWIFSSVVQVKQ | |
| | TAIPDYRNMIGQGA | |
| Murine kappa | ADAAPTVSIFPPSSEQLTSGGASVVCFLNNFYPKDINVKWKIDGSERQ | 1447 |
| light chain | NGVLNSWTDQDSKDSTYSMSSTLTLTKDEYERHNSYTCEATHKTSTSP | |
| constant region | IVKSFNRNEC | |
| Murine lambda | QPKSSPSVTLFPPSSEELETNKATLVCTITDFYPGVVTVDWKVDGTPV | 1448 |
| light chain | TQGMETTQPSKQSNNKYMASSYLTLTARAWERHSSYSCQVTHEGHTVE | |
| constant region | KSLSRADCS | |
| (subclass 1) | | |
| Murine lambda | QPKSTPTLTVFPPSSEELKENKATLVCLISNFSPSGVTVAWKANGTPI | 1449 |
| light chain | TQGVDTSNPTKEGNKFMASSFLHLTSDQWRSHNSFTCQVTHEGDTVEK | |
| constant region | SLSPAECL | |
| (subclass 2) | | |
| Murine lambda | QPKSTPTLTMFPPSPEELQENKATLVCLISNFSPSGVTVAWKANGTPI | 1450 |
| light chain | TQGVDTSNPTKEDNKYMASSFLHLTSDQWRSHNSFTCQVTHEGDTVEK | |
| constant region | SLSPAECL | |
| (subclass 3) | | |

[1427] In some embodiments, the anti-tau antibodies may comprise an Fc region or variant, e.g., functional variant, thereof.

[1428] In some embodiments, the antibody comprises an Fc region which has modified, e.g., increased or reduced affinity (e.g., ablated), affinity for an Fc receptor, e.g., as compared to a reference, wherein the reference is a wild-type Fc receptor.

[1429] In some embodiments, the antibody comprises an Fc region which comprises a mutation at one, two, or all of positions 1253 (e.g., 1235A), H310 (e.g., H310A), and/or H435 (e.g., H435A), numbered according to the EU index as in Kabat.

### Antibody Characterization

[1430] In some embodiments, antibodies of the present disclosure may be identified, selected, or excluded based on different characteristics. Such characteristics may include, but are not limited to, physical and functional characteristics. Physical characteristics may include features of antibody structures [e.g., amino acid sequence or residues; secondary, tertiary, or quaternary protein structure; post-translational modifications (e.g., glycosylations); chemical bonds, and stability]. Functional characteristics may include, but are not limited to, antibody affinity (i.e., for specific epitopes and/or antigens) and antibody activity (e.g., antibody ability to activate or inhibit a target, process, or pathway).

### Antibody Binding and Affinity

[1431] In some embodiments, antibodies of the present disclosure may be identified, selected, or excluded based on binding and/or level of affinity for specific epitopes and/or antigens. Antibody binding and/or affinity level may be assessed with different antigen formats. In some embodiments, antibody affinity for different antigen formats may be tested in vitro (e.g., by ELISA). Anti-tau antibody in vitro testing may be carried out using brain samples or fractions. Such samples or fractions may be obtained from subjects with AD (e.g., human AD patients). In some embodiments, brain samples or fractions may be obtained from non-human subjects. Such non-human subjects may include non-human animals used in AD disease model studies (e.g., mice, rats, and primates). In some embodiments, brain samples or fractions used for antibody affinity testing may be derived from TG4510/P301S mouse strains. Antibody affinity may be compared against control samples lacking the particular antigen for which affinity is being analyzed. In some embodiments, control samples used for anti-tau antibody testing may include brain samples or fractions from non-diseased human subjects. In some embodiments, brain samples or fractions from wild type and/or Tau knockout mouse strains may be used as control samples.

[1432] In vitro affinity testing may be carried out (e.g., by ELISA) using recombinant or isolated protein antigens. For example, recombinant or isolated ePHF may be used for anti-tau antibody affinity testing. In some embodiments, anti-tau antibodies of the present disclosure may exhibit a half maximal effective concentration (EC50) of from about 0.01 nM to about 100 nM for binding to ePHF when assessed by ELISA. In some embodiments, the exhibited EC50 may be less than about 50 nM, less than about 20 nM, less than about 10 nM, or less than about 1 nM. In some embodiments, anti-tau antibodies of the present disclosure may exhibit an EC50 of from about 0.01 nM to about 100 nM for binding to any of the antigens listed in Table 4, or an epitope that includes or is included within any of the antigens (including, but not limited to conformational epitopes), when assessed by ELISA. In some embodiments, the exhibited EC50 may be less than about 50 nM, less than about 20 nM, less than about 10 nM, or less than about 1 nM.

[1433] In some embodiments, anti-tau antibodies of the present disclosure bind to pathological tau, but do not bind to non-pathological tau. Such antibodies may be referred to herein as being “selective” for pathological forms of tau. In some embodiments, anti-tau antibodies of the present disclosure bind to tau tangles.

[1434] In some embodiments, antibody affinity analysis may be used to identify, select, or exclude polyspecific antibodies. As used herein, the term “polyspecific antibody” refers to an antibody with affinity for more than one epitope or antigen. In some embodiments, polyspecific antibodies may be identified, selected, or excluded based on relative affinity for each epitope or antigen recognized. For example, a polyspecific antibody may be selected for use or further development based on higher affinity for one epitope or antigen over a second epitope or antigen for which the polyspecific antibody demonstrates affinity.

[1435] In some embodiments, anti-tau antibodies may be tested for competition with other anti-tau antibodies. Such testing may be carried out to provide information on the specific epitope recognized by an antibody and may yield information related to level of epitope affinity in comparison to the competing antibody. In some embodiments, anti-tau antibodies used in antibody binding and/or affinity analysis may include anti-tau antibody PT3, as described in U.S. Pat. No. 9,371,376; anti-tau antibody C10.2, as described in U.S. Pat. No. 10,196,439 (referred to as antibody “C10-2,” therein); anti-tau antibody IPN002, as described in U.S. Pat. No. 10,040,847; anti-tau antibody AT8 (ThermoFisher, Waltham, MA); anti-tau antibody AT100 (ThermoFisher, Waltham, MA); anti-tau antibody AT120 as described in U.S. Pat. No. 5,843,779; or anti-tau antibody PT76, as described in Vandermeeren, M. et al., J Alzheimers Dis. 2018; 65(1):265-281.

### Antibody Activity

[1436] In some embodiments, antibodies of the present disclosure may be identified, selected, or excluded based on their ability to promote or reduce a certain activity. Antibody activity may be assessed using analytical assays. Such assays may be selected or designed to detect, screen, measure, and/or rank antibodies based on such antibody activity.

[1437] Anti-tau antibodies may be characterized by ability to inhibit tau aggregation. Inhibition may be based on physical disruption of tau aggregation or may be based on anti-tau antibody-dependent depletion (immunodepletion) of tau protein. Characterization based on tau aggregation inhibition may be assessed using one or more assays of tau aggregation. In some embodiments, anti-tau antibodies may be characterized by tau seeding assay. Tau seeding assays typically involve in vitro initiation of tau aggregation and assessment of aggregation inhibition by candidate compounds being tested. Tau seeding assays may be carried out using tau aggregation biosensor cells. Tau aggregation biosensor cells yield a detectable signal (e.g., a fluorescent signal) in response to tau aggregation. Tau aggregation biosensor cells may be cultured with recombinant or isolated tau or with samples from high tau brain tissues or fluids (to promote tau aggregation) and treated with or without candidate compounds to assess tau aggregation inhibition. In some embodiments, anti-tau antibodies may be used to deplete tau from media prior to incubation with biosensor cells. Aggregation levels with depleted media may be compared to aggregation levels with non-depleted media to assess anti-tau antibody inhibitory function. Tau aggregation biosensor cells may include, but are not limited to, tau RD Biosensor cells. In some embodiments, neurons expressing human tau may be used.

[1438] In some embodiments, anti-tau antibodies of the present disclosure may inhibit tau aggregation with a half maximal inhibitory concentration (IC50) of from about 1 nM to about 30 nM as determined by immunodepletion assay (e.g., using tau RD Biosensor cells).

### Antibody Structure and Variations

[1439] Antibodies of the present disclosure may exist as a whole polypeptide, a plurality of polypeptides or fragments of polypeptides, which independently may be encoded by one or more nucleic acids, a plurality of nucleic acids, fragments of nucleic acids or variants of any of the aforementioned. As used herein, “polypeptide” means a polymer of amino acid residues (natural or unnatural) linked together most often by peptide bonds. The term, as used herein, refers to proteins, polypeptides, and peptides of any size, structure, or function. Polypeptides smaller than about 50 amino acids may be referred to using the term “peptide.” Peptides may be at least about 2, 3, 4, or at least 5 amino acid residues long. Polypeptides of the present disclosure may include gene products, naturally occurring polypeptides, synthetic polypeptides, homologs, orthologs, paralogs, fragments, or other equivalents, variants, and analogs of the foregoing. Polypeptides may be single molecules or may be multi-molecular complexes such as dimers, trimers, or tetramers. Polypeptides may also include single chain or multichain polypeptides, which may be associated or linked. Polypeptides may include amino acid polymers in which one or more amino acid residues are artificial chemical analogues of corresponding naturally occurring amino acids.

[1440] The term “polypeptide variant” refers to molecules which differ in their amino acid sequence from a native or reference sequence. Amino acid sequence variants may possess substitutions, deletions, and/or insertions at certain positions within the amino acid sequence, as compared to a native or reference sequence. Ordinarily, variants will possess at least about 50% identity (homology) to a native or reference sequence, and preferably, they will be at least about 80%, more preferably at least about 90% identical (homologous) to a native or reference sequence.

[1441] In some embodiments “variant mimics” are provided. As used herein, the term “variant mimic” is one which contains one or more amino acids which would mimic an activated sequence. For example, glutamate may serve as a mimic for phosphorylated threonine and/or phosphorylated serine. Alternatively, variant mimics may result in deactivation or in an inactivated product containing the mimic, e.g., phenylalanine may act as an inactivating substitution for tyrosine; or alanine may act as an inactivating substitution for serine.

[1442] The term “amino acid sequence variant” refers to molecules with some differences in their amino acid sequences as compared to a native or starting sequence. The amino acid sequence variants may possess substitutions, deletions, and/or insertions at certain positions within the amino acid sequence. “Native” or “starting” sequence should not be confused with a wild type sequence. As used herein, a native or starting sequence is a relative term referring to an original molecule against which a comparison may be made. “Native” or “starting” sequences or molecules may represent the wild-type (that sequence found in nature) but do not have to be the wild-type sequence.

[1443] Ordinarily, variants will possess at least 70%, at least 75%, at least 80%, at least 85%, at least 90%, at least 95%, at least 96%, at least 97%, at least 98%, at least 99%, at least 99.5% at least 99.8%, or at least 99.9% sequence identity as compared to a native sequence.

[1444] By “homologs” as it applies to amino acid sequences is meant the corresponding sequence of other species having substantial identity to a second sequence of a second species.

[1445] “Analogs” is meant to include polypeptide variants which differ by one or more amino acid alterations, e.g., substitutions, additions or deletions of amino acid residues that still maintain the properties of the parent polypeptide.

[1446] The present disclosure contemplates variants and derivatives of antibodies presented herein. These include substitutional, insertional, deletion and covalent variants and derivatives. For example, sequence tags or amino acids, such as one or more lysines, may be added to antibody peptide sequences (e.g., at the N-terminal or C-terminal ends). Sequence tags may be used for peptide purification or localization. Lysines may be used to increase peptide solubility or to allow for biotinylation. Alternatively, amino acid residues located at the carboxy and amino terminal regions of the amino acid sequence of a peptide or polypeptide may optionally be deleted providing for truncated sequences. Certain amino acids (e.g., C-terminal or N-terminal residues) may alternatively be deleted depending on the use of the sequence, as for example, expression of the sequence as part of a larger sequence which is soluble, or linked to a solid support.

[1447] “Substitutional variants” when referring to polypeptides are those that have at least one amino acid residue in a native or starting sequence removed and a different amino acid inserted in its place at the same position. The substitutions may be single, where only one amino acid in the molecule has been substituted, or they may be multiple, where two or more amino acids have been substituted in the same molecule.

[1448] As used herein the term “conservative amino acid substitution” refers to the substitution of an amino acid that is normally present in the sequence with a different amino acid of similar size, charge, or polarity. Examples of conservative substitutions include the substitution of a non-polar (hydrophobic) residue such as isoleucine, valine and leucine for another non-polar residue. Likewise, examples of conservative substitutions include the substitution of one polar (hydrophilic) residue for another such as between arginine and lysine, between glutamine and asparagine, and between glycine and serine. Additionally, the substitution of a basic residue such as lysine, arginine or histidine for another, or the substitution of one acidic residue such as aspartic acid or glutamic acid for another acidic residue are additional examples of conservative substitutions. Examples of non-conservative substitutions include the substitution of a non-polar (hydrophobic) amino acid residue such as isoleucine, valine, leucine, alanine, methionine for a polar (hydrophilic) residue such as cysteine, glutamine, glutamic acid or lysine and/or a polar residue for a non-polar residue.

[1449] The term “functional variant” refers to a polypeptide variant or a polynucleotide variant that has at least one activity of the reference sequence.

[1450] “Insertional variants” when referring to polypeptides are those with one or more amino acids inserted immediately adjacent to an amino acid at a particular position in a native or starting sequence. “Immediately adjacent” to an amino acid means connected to either the alpha-carboxy or alpha-amino functional group of the amino acid.

[1451] “Deletional variants” when referring to polypeptides, are those with one or more amino acids in the native or starting amino acid sequence removed. Ordinarily, deletional variants will have one or more amino acids deleted in a particular region of the molecule.

[1452] As used herein, the term “derivative” is used synonymously with the term “variant” and refers to a molecule that has been modified or changed in any way relative to a reference molecule or starting molecule. In some embodiments, derivatives include native or starting polypeptides that have been modified with an organic proteinaceous or non-proteinaceous derivatizing agent, and post-translational modifications. Covalent modifications are traditionally introduced by reacting targeted amino acid residues of a polypeptide with an organic derivatizing agent that is capable of reacting with selected side-chains or terminal residues, or by harnessing mechanisms of post-translational modifications that function in selected recombinant host cells. The resultant covalent derivatives are useful in programs directed at identifying residues important for biological activity, for immunoassays, or for the preparation of antibodies for immunoaffinity purification.

[1453] Certain post-translational modifications are the result of the action of recombinant host cells on the expressed polypeptide. Glutaminyl and asparaginyl residues are frequently post-translationally deamidated to the corresponding glutamyl and aspartyl residues. Alternatively, these residues are deamidated under mildly acidic conditions. Either form of these residues may be present in polypeptides used in accordance with the present disclosure.

[1454] Other post-translational modifications include hydroxylation of proline and lysine, phosphorylation of hydroxyl groups of seryl or threonyl residues, methylation of the alpha-amino groups of lysine, arginine, and histidine side chains (T. E. Creighton, Proteins: Structure and Molecular Properties, W. H. Freeman & Co., San Francisco, pp. 79-86 (1983)).

[1455] Covalent derivatives specifically include fusion molecules in which polypeptides are covalently bonded to non-proteinaceous polymers. Non-proteinaceous polymers may include hydrophilic synthetic polymers, i.e., polymers not otherwise found in nature. However, polymers which exist in nature and are produced by recombinant or in vitro methods are useful, as are polymers which are isolated from nature. Hydrophilic polyvinyl polymers may include polyvinylalcohol and/or polyvinylpyrrolidone. Particularly useful are polyvinylalkylene ethers such a polyethylene glycol and polypropylene glycol. Polypeptides may be linked to various non-proteinaceous polymers, such as polyethylene glycol, polypropylene glycol or polyoxyalkylenes, in the manner set forth in U.S. Pat. Nos. 4,640,835; 4,496,689; 4,301,144; 4,670,417; 4,791,192 or 4,179,337, the contents of each of which are herein incorporated by reference in their entirety.

[1456] “Features” when referring to polypeptides are defined as distinct amino acid sequence-based components of a molecule. Polypeptide features may include surface manifestations, local conformational shape, folds, loops, half-loops, domains, half-domains, sites, termini or any combination thereof.

[1457] As used herein when referring to polypeptides the term “surface manifestation” refers to an amino acid-based component of a polypeptide appearing on an outermost surface.

[1458] As used herein when referring to polypeptides the term “local conformational shape” means an amino acid-based structural manifestation of a polypeptide which is located within a definable space of the polypeptide.

[1459] As used herein when referring to polypeptides the term “fold” means the resultant conformation of an amino acid sequence upon energy minimization. A fold may occur at the secondary or tertiary level of the folding process. Examples of secondary level folds include beta sheets and alpha helices. Examples of tertiary folds include domains and regions formed due to aggregation or separation of energetic forces. Regions formed in this way include hydrophobic and hydrophilic pockets, and the like.

[1460] As used herein the term “turn” as it relates to polypeptide conformation means a bend which alters the direction of the backbone of a peptide or polypeptide and may involve one, two, three or more amino acid residues.

[1461] As used herein when referring to polypeptides the term “loop” refers to a structural feature of a peptide or polypeptide which reverses the direction of the backbone of a peptide or polypeptide and includes four or more amino acid residues. Oliva et al. have identified at least 5 classes of polypeptide loops (J. Mol Biol 266 (4): 814-830; 1997, the contents of which are herein incorporated by reference in their entirety).

[1462] As used herein when referring to polypeptides the term “half-loop” refers to a portion of an identified loop having at least half the number of amino acid resides as the loop from which it is derived. It is understood that loops may not always contain an even number of amino acid residues. Therefore, in those cases where a loop contains or is identified to include an odd number of amino acids, a half-loop of the odd-numbered loop will include the whole number portion or next whole number portion of the loop (number of amino acids of the loop/2+/−0.5 amino acids). For example, a loop identified as a 7 amino acid loop could produce half-loops of 3 amino acids or 4 amino acids (7/2=3.5+/−0.5 being 3 or 4).

[1463] As used herein when referring to polypeptides the term “domain” refers to a motif of a polypeptide having one or more identifiable structural or functional characteristics or properties (e.g., binding capacity), serving as a site for protein-protein interactions.

[1464] As used herein when referring to polypeptides the term “half-domain” means portion of an identified domain having at least half the number of amino acid resides as the domain from which it is derived. It is understood that domains may not always contain an even number of amino acid residues. Therefore, in those cases where a domain contains or is identified to include an odd number of amino acids, a half-domain of the odd-numbered domain will include the whole number portion or next whole number portion of the domain (number of amino acids of the domain/2+/−0.5 amino acids). For example, a domain identified as a 7 amino acid domain could produce half-domains of 3 amino acids or 4 amino acids (7/2=3.5+/−0.5 being 3 or 4). It is also understood that sub-domains may be identified within domains or half-domains, these subdomains possessing less than all of the structural or functional properties identified in the domains or half domains from which they were derived. It is also understood that the amino acids of any of the domain types herein need not be contiguous along the backbone of the polypeptide (i.e., nonadjacent amino acids may fold structurally to produce a domain, half-domain or subdomain).

[1465] As used herein when referring to polypeptides, the term “site” is synonymous with “amino acid residue” and “amino acid side chain.” A site represents a position on a polypeptide that may be modified, manipulated, altered, derivatized or varied within the polypeptide.

[1466] As used herein the terms “termini or terminus” when referring to polypeptides refers to an extremity of a peptide or polypeptide. Such extremity is not limited only to the first or final site of the peptide or polypeptide but may include additional amino acids in the terminal regions. Polypeptide based molecules of the present disclosure may be characterized as having both an N-terminus (terminated by an amino acid with a free amino group) and a C-terminus (terminated by an amino acid with a free carboxyl group). Proteins of the present disclosure are in some cases made up of multiple polypeptide chains brought together by disulfide bonds or by non-covalent forces (multimers, oligomers). These sorts of proteins will have multiple N- and C-termini. Alternatively, the termini of the polypeptides may be modified such that they begin or end, as the case may be, with a non-polypeptide based moiety such as an organic conjugate.

### Antibody Modification

[1467] Antibodies may be modified to obtain variants with one or more altered properties. Such properties may include or relate to antibody structure, function, affinity, specificity, protein folding, stability, manufacturing, expression, and/or immunogenicity (i.e., immune reactions in subjects being treated with such antibodies). In some embodiments, antibody fragments or variants may be used to modify another antibody or may be incorporated into a synthetic antibody.

[1468] Antibody modification may include amino acid sequence modifications. Such modifications may include, but are not limited to, amino acid deletions, additions, and/or substitutions. Modifications may be informed by amino acid sequence analysis. Such analysis may include alignment of amino acid sequences between different antibodies or antibody variants. Two or more antibodies may be compared to identify residues or regions suitable for modification. Compared antibodies may include those binding to the same epitope. Compared antibodies may bind to different epitopes (separate or overlapping) of the same protein or target (e.g., to identify residues or regions conferring specificity to specific epitopes). Comparisons may include light and/or heavy chain sequence variation analysis, CDR sequence variation analysis, germline sequence analysis, and/or framework sequence analysis. Information obtained from such analysis may be used to identify amino acid residues, segments of amino acids, amino acid side chains, CDR lengths, and/or other features or properties that are conserved or variable among antibodies binding to the same or different epitopes.

### Functional Modifications

[1469] In some embodiments, antibodies of the present disclosure be modified to optimize one or more functional properties (e.g., antibody affinity or activity). Non-limiting examples of antibody functional properties include epitope or antigen affinity, ability to mobilize or immobilize targets, and ability to activate or inhibit a target, process, or pathway. In some embodiments, functional properties include or relate to ability to modulate protein-protein interactions, protein aggregation, enzyme activity, receptor-ligand interactions, cellular signaling pathways, proteolytic cascades, and/or biological or physiological responses.

[1470] Antibody modifications may optimize antibodies by modulating epitope affinity. Such modifications may be carried out by affinity maturation. Affinity maturation technology is used to identify sequences encoding CDRs with highest affinity for target antigens. In some embodiments, antibody display technologies (e.g., phage or yeast) may be used. Such methods may include mutating nucleotide sequences encoding parental antibodies being optimized. Nucleotide sequences may be mutated randomly as a whole or to vary expression at specific amino acid residues to create millions to billions of variants. Sites or residues may be selected for mutation based on sequences or amino acid frequencies observed in natural human antibody repertoires. Variants may be subjected to repeated rounds of affinity screening [e.g., using display library screening technologies, surface plasmon resonance technologies, fluorescence-associated cell sorting (FACS) analysis, enzyme-linked immunosorbent assay (ELISA), etc.] for target antigen binding. Repeated rounds of selection, mutation, and expression may be carried out to identify antibody fragment sequences with highest affinity for target antigens. Such sequences may be directly incorporated into antibody sequences for production. In some cases, the goal of affinity maturation is to increase antibody affinity by at least 2-fold, at least 3-fold, at least 4-fold, at least 5-fold, at least 6-fold, at least 7-fold, at least 8-fold, at least 9-fold, at least 10-fold, at least 20-fold, at least 30-fold, at least 40-fold, at least 50-fold, at least 100 fold, at least 500-fold, at least 1,000-fold, or more than 1,000-fold as compared to the affinity of an original or starting antibody. In cases where affinity is less than desired, the process may be repeated.

[1471] In some embodiments, antibody affinity may be assessed with different antigen formats. In some embodiments, antibody affinity for different antigen formats may be tested in vitro (e.g., by ELISA). In vitro testing may be carried out using brain samples or fractions. Such samples or fractions may be obtained from subjects with AD (e.g., human AD patients). In some embodiments, brain samples or fractions may be obtained from non-human subjects. Such non-human subjects may include non-human animals used in AD disease model studies (e.g., mice, rats, and primates). In some embodiments, brain samples or fractions used for antibody affinity testing may be derived from TG4510/P301S mouse strains. Antibody affinity may be compared against control samples lacking the particular antigen for which affinity is being analyzed. In some embodiments, control samples may include brain samples or fraction from non-diseased human subjects. In some embodiments, brain samples or fractions from wild type and/or Tau knockout mouse strains may be used as control samples. In vitro affinity testing may be carried out (e.g., by ELISA) using recombinant or isolated protein antigens. In some embodiments, recombinant or isolated ePHF is used for antibody affinity testing. In some embodiments, antigens listed in Table 4 may be used.

[1472] In some embodiments, antibody affinity analysis may be used to modulate antibody polyspecificity (e.g., to reduce or enhance antibody polyspecificity). Such modulation may include modulating relative affinity for two or more epitopes or antigens. For example, antibodies may be optimized for higher affinity for one epitope or antigen over a second epitope or antigen.

[1473] Antibodies may be modified to optimize antibody functional properties. Such functional properties may be assessed or engineered based on analytical assay results relating to one or more antibody functional properties. Assays may be used to screen multiple antibodies to identify or rank antibodies based on functional criteria. Anti-tau antibodies may be modified to optimize tau aggregation inhibition. Such inhibition may be based on physical disruption of tau aggregation or may be based on the ability of anti-tau antibodies to deplete tau protein from assay samples. Optimization based on tau aggregation inhibition may be assessed using one or more assays of tau aggregation (e.g., by tau seeding assay).

### Production Modifications

[1474] In some embodiments, modifications may be made to optimize antibody production. Such modifications may include or relate to one or more of protein folding, stability, expression, and/or immunogenicity. Modifications may be carried out to address one or more antibody features negatively impacting production. Such features may include, but are not limited to, unpaired cysteines or irregular disulfides; glycosylation sites (e.g., N-linked NXS/T sites); acid cleavage sites, amino acid oxidation sites, conformity with mouse germline sequences; asparagine deamidation sites; aspartate isomerization sites; N-terminal pyroglutamate formation sites; and aggregation-prone amino acid sequence regions (e.g., within CDR sequences).

### Methods of Production

[1475] In some embodiments, antibodies of the present disclosure may be prepared using recombinant DNA technology (e.g., see U.S. Pat. No. 4,816,567, which is hereby incorporated by reference in its entirety). Antibody-encoding DNA may be isolated and sequenced using conventional procedures (e.g., by using oligonucleotide probes that are capable of binding specifically to genes encoding the heavy and light chains of murine antibodies). In some embodiments, hybridoma cells may be used as a preferred source of DNA. Once isolated, the DNA can be placed into expression vectors, which are then transfected into host cells. Host cells may include, but are not limited to HEK293 cells, HEK293T cells, simian COS cells, Chinese hamster ovary (CHO) cells, and myeloma cells that do not otherwise produce immunoglobulin protein, to obtain the synthesis of monoclonal antibodies in the recombinant host cells. The DNA also can be modified, for example, by substituting the coding sequence for human heavy and light chain constant domains in place of the homologous murine sequences (U.S. Pat. No. 4,816,567) or by covalently joining to the immunoglobulin coding sequence all or part of the coding sequence for a non-immunoglobulin polypeptide.

[1476] Methods for producing the anti-tau antibodies described herein include, for example, expressing the heavy chain and the light chains of the antibody in a cell line comprising the nucleic acid sequences or vector(s) (e.g., expression vector(s)) expressing the heavy chain and light chains. Host cells comprising these nucleic acid sequences (e.g., the nucleic acid sequences described herein, such as in Table 1) are encompassed herein.

[1477] Once DNA fragments encoding VH and VL segments are obtained, these DNA fragments can be further manipulated by standard recombinant DNA techniques, for example to convert the variable region genes to full-length antibody chain genes, to Fab fragment genes or to a scFv gene. In these manipulations, a VL- or VH-encoding DNA fragment is operatively linked to another DNA fragment encoding another protein, such as an antibody constant region (e.g., a constant region listed in Table 5) or a flexible linker. The term “operatively linked”, as used in this context, is intended to mean that the two DNA fragments are joined such that the amino acid sequences encoded by the two DNA fragments remain in-frame.

[1478] The isolated DNA encoding the VH region can be converted to a full-length heavy chain gene by operatively linking the VH-encoding DNA to another DNA molecule encoding heavy chain constant regions (hinge, CH1, CH2 and/or CH3), e.g., a heavy chain constant region described in Table 5. The sequences of human heavy chain constant region genes are known in the art (see e.g., Kabat, E. A., et al. (1991) Sequences of Proteins of Immunological Interest, Fifth Edition, U.S. Department of Health and Human Services, NIH Publication No. 91-3242) and DNA fragments encompassing these regions can be obtained by standard PCR amplification. The heavy chain constant region can be an IgG1, IgG2, IgG3, IgG4, IgA, IgE, IgM or IgD constant region, for example, an IgG1 region, as discussed supra. For a Fab fragment heavy chain gene, the VH-encoding DNA can be operatively linked to another DNA molecule encoding only the heavy chain CH1 constant region.

[1479] The isolated DNA encoding the VL region can be converted to a full-length light chain gene (as well as a Fab light chain gene) by operatively linking the VL-encoding DNA to another DNA molecule encoding the light chain constant region, CL, e.g., a light chain constant region described in Table 5. The sequences of human light chain constant region genes are known in the art (see e.g., Kabat, E. A., et al. (1991) Sequences of Proteins of Immunological Interest, Fifth Edition, U.S. Department of Health and Human Services, NIH Publication No. 91-3242) and DNA fragments encompassing these regions can be obtained by standard PCR amplification. The light chain constant region can be a kappa or lambda constant region, as discussed supra.

[1480] To express the antibodies described herein, nucleic acids encoding partial or full-length light and heavy chains, or a combination of nucleic acids encoding partial or full-length light and heavy chains, can be obtained by standard molecular biology techniques (e.g., PCR amplification or cDNA cloning using a hybridoma that expresses the antibody of interest) and the DNAs can be inserted into expression vectors such that the genes are operatively linked to transcriptional and translational control sequences. In this context, the term “operatively linked” is intended to mean that an antibody gene is ligated into a vector such that transcriptional and translational control sequences within the vector serve their intended function of regulating the transcription and translation of the antibody gene. The expression vector and expression control sequences are chosen to be compatible with the expression host cell used. The antibody light chain gene and the antibody heavy chain gene can be inserted into separate vector or both genes are inserted into the same expression vector. The antibody genes are inserted into the expression vector(s) by standard methods (e.g., ligation of complementary restriction sites on the antibody gene fragment and vector, or blunt end ligation if no restriction sites are present). The light and heavy chain variable regions of the antibodies described herein can be used to create full-length antibody genes of any antibody isotype by inserting them into expression vectors already encoding heavy chain constant and light chain constant regions of the desired isotype such that the V_{H} segment is operatively linked to the C_{H} segment(s) within the vector and the V_{L} segment is operatively linked to the C_{L} segment within the vector.

[1481] Additionally, the recombinant expression vector can encode a signal peptide that facilitates secretion of the antibody chain from a host cell. The antibody chain gene can be cloned into the vector such that the signal peptide is linked in-frame to the amino terminus of the antibody chain gene. The signal peptide can be an immunoglobulin signal peptide or a heterologous signal peptide (i.e., a signal peptide from a non-immunoglobulin protein).

[1482] For expression of the light and heavy chains, the expression vector (e.g., when nucleic acids encoding the light and heavy chains are present in one vector), or combination of expression vectors (e.g., when the nucleic acid encoding the light chain is present in one vector, and the nucleic acid encoding the heavy chain is present in a separate vector), is transfected into a host cell by standard techniques. The various forms of the term “transfection” are intended to encompass a wide variety of techniques commonly used for the introduction of exogenous DNA into a prokaryotic (bacterial host cell) or eukaryotic host cell, e.g., electroporation, calcium-phosphate precipitation, DEAE-dextran transfection and the like.

[1483] Exemplary mammalian cells for expressing the recombinant antibodies described herein include Chinese Hamster Ovary (CHO cells) (including dhfr-CHO cells, described in Urlaub and Chasin, (1980) Proc. Natl. Acad. Sci. USA 77:4216-4220, used with a DHFR selectable marker, e.g., as described in R. J. Kaufman and P. A. Sharp (1982) Mol. Biol. 159:601-621), NSO myeloma cells, COS cells and SP2 cells. When recombinant expression vectors encoding antibody genes are introduced into mammalian host cells, the antibodies are produced by culturing the host cells for a period of time sufficient to allow for expression of the antibody in the host cells or, more preferably, secretion of the antibody into the culture medium in which the host cells are grown. Antibodies can be recovered from the culture medium using standard protein purification methods.

### Antibody Humanization

[1484] In some embodiments, anti-tau antibodies of the present disclosure may be prepared as humanized antibodies. “Humanized” antibodies are chimeric antibodies that contain minimal sequences (e.g., variable domains or CDRs) derived from non-human immunoglobulins (e.g., murine immunoglobulins). Humanized antibodies may be prepared from human (recipient) immunoglobulins in which residues from the hypervariable regions are replaced by hypervariable region residues from one or more non-human “donor” antibodies (e.g., mouse, rat, rabbit, or nonhuman primate). Donor antibodies may be selected based on desired specificity, affinity, and/or capacity. Humanized antibodies may include one or more back-mutation that includes the reversion of one or more amino acids back to amino acids found in a donor antibody. Conversely, residues from donor antibodies included in humanized antibodies may be mutated to match residues present in human recipient antibodies. Back-mutations may be introduced to reduce human immune response to the humanized antibodies. In some embodiments, back-mutations are introduced to avoid issues with antibody manufacturing (e.g., protein aggregation or post-translational modification).

[1485] For construction of expression plasmids encoding fully humanized antibodies with human constant regions, DNA sequences encoding antibody variable regions may be inserted into expression vectors (e.g., mammalian expression vectors) between an upstream promoter/enhancer and immunoglobulin signal sequence and a downstream immunoglobulin constant region gene. DNA samples may then be transfected into mammalian cells for antibody production. Constant domains from any class of human antibody may be used. There are five major classes of intact human antibodies: IgA, IgD, IgE, IgG, and IgM, and several of these may be further divided into subclasses (isotypes), e.g., IgG1, IgG2a, IgG2b, IgG2c, IgG3, IgG4, IgA, and IgA2.

[1486] Cell lines with stable transfection of DNA encoding humanized antibodies may be prepared and used to establish stable cell lines. Cell lines producing humanized antibodies may be expanded for expression of humanized antibodies that may be harvested and purified from cell culture media.

[1487] In some embodiments, humanized antibodies of the present disclosure may have cross-reactivity with non-human species. Species cross-reactivity may allow antibodies to be used in different animals for various purposes. For example, cross-reactive antibodies may be used in pre-clinical animal studies to provide information about antibody efficacy and/or toxicity. Non-human species may include, but are not limited to, mouse, rat, rabbit, dog, pig, goat, sheep, and nonhuman primates (e.g., Cynomolgus monkeys).

### Antibody Conjugates

[1488] In some embodiments, antibodies of the present disclosure may be or be prepared as antibody conjugates. As used herein, the term “conjugate” refers to any agent, cargo, or chemical moiety that is attached to a recipient entity or the process of attaching such an agent, cargo, or chemical moiety. As used herein, the term “antibody conjugate” refers to any antibody with an attached agent, cargo, or chemical moiety. Conjugates utilized to prepare antibody conjugates may include therapeutic agents. Such therapeutic agents may include drugs. Antibody conjugates that include a conjugated drug are referred to herein as “antibody drug conjugates.” Antibody drug conjugates may be used to direct conjugated drugs to specific targets based on the affinity of associated antibodies for proteins or epitopes associated with such targets. Such antibody drug conjugates may be used to localize biological activity associated with such conjugated drugs to targeted cells, tissues, organs, or other targeted entities. In some embodiments, conjugates utilized to prepare antibody conjugates include detectable labels. Antibodies may be conjugated with detectable labels for purposes of detection. Such detectable labels may include, but are not limited to, radioisotopes, fluorophores, chromophores, chemiluminescent compounds, enzymes, enzyme co-factors, dyes, metal ions, ligands, biotin, avidin, streptavidin, haptens, quantum dots, or any other detectable labels known in the art or described herein.

[1489] Conjugates may be attached to antibodies directly or via a linker. Direct attachment may be by covalent bonding or by non-covalent association (e.g., ionic bonds, hydrostatic bonds, hydrophobic bonds, hydrogen bonds, hybridization, etc.). Linkers used for conjugate attachment may include any chemical structure capable of connecting an antibody to a conjugate. In some embodiments, linkers include polymeric molecules (e.g., nucleic acids, polypeptides, polyethylene glycols, carbohydrates, lipids, or combinations thereof). Antibody conjugate linkers may be cleavable (e.g., through contact with an enzyme, change in pH, or change in temperature).

### Payload Component: Linkers

[1490] In some embodiments, the nucleic acid encoding the payload, e.g., antibody or fragment thereof, comprises a nucleotide sequence encoding a linker. In some embodiments, the nucleic acid encoding the payload encodes two or more linkers. In some embodiments, the encoded linker comprises a linker provided in Table 41A. In some embodiments, the encoded linker comprises an amino acid sequence encoded by any one of the nucleotide sequences provided in Table 41A, or an amino acid sequence with at least 70%, 75%, 80%, 85%, 90%, 95%, or 99% sequence identity thereto. In some embodiments, the nucleotide sequence encoding the linker comprises any one of the nucleotide sequences provided in Table 41A, or a nucleotide sequence with at least 70%, 75%, 80%, 85%, 90%, 95%, or 99% sequence identity thereto.

TABLE 41A
Linkers

| De- | SEQ | |
|---|---|---|
| scrip- | ID | |
| tion | NO | Sequence |
| Furin | 1724 | AGAAAGAGGCGA |
| Furin | 1725 | CGGGCCAAGCGG |
| T2A | 1726 | GAGGGCAGAGGAAGTCTTCTAACATGCGGTGA |
| | | CGTGGAGGAGAATCCCGGCCCT |
| F2A | 1727 | GGAAGCGGAGTGAAACAGACTTTGAATTTTGA |
| | | CCTTCTCAAGTTGGCGGGAGACGTGGAGTCCA |
| | | ACCCTGGACCT |
| P2A | 1728 | GGAAGCGGAGCTACTAACTTCAGCCTGCTGAA |
| | | GCAGGCTGGAGACGTGGAGGAGAACCCTGGAC |
| | | CT |
| SG4S | 1729 | TCCGGAGGCGGCGGCAGC |
| (SEQ | | |
| ID NO: | | |
| 5440) | | |
| (G4S)3 | 1730 | GGTGGTGGTGGTAGCGGCGGCGGCGGCTCTGG |
| (SEQ | | TGGTGGTGGATCC |
| ID NO: | | |
| 1470) | | |
| (G4S)5 | 1731 | GGCGGAGGTGGCTCCGGAGGCGGAGGCAGCGG |
| (SEQ | | CGGAGGTGGGTCTGGCGGAGGCGGGTGCGGCG |
| ID NO: | | GAGGTGGCTCC |
| 5441) | | |
| IRES | 1732 | AATTCCGCCCCTCTCCCCCCCCCCCCTCTCCC |
| | | TCCCCCCCCCCTAACGTTACTGGCCGAAGCCG |
| | | CTTGGAATAAGGCCGGTGTGCGTTTGTCTATA |
| | | TGTTATTTTCCACCATATTGCCGTCTTTTGGC |
| | | AATGTGAGGGCCCGGAAACCTGGCCCTGTCTT |
| | | CTTGACGAGCATTCCTAGGGGTCTTTCCCCTC |
| | | TCGCCAAAGGAATGCAAGGTCTGTTGAATGTC |
| | | GTGAAGGAAGCAGTTCCTCTGGAAGCTTCTTG |
| | | AAGACAAACAACGTCTGTAGCGACCCTTTGCA |
| | | GGCAGCGGAACCCCCCACCTGGCGACAGGTGC |
| | | CTCTGCGGCCAAAAGCCACGTGTATAAGATAC |
| | | ACCTGCAAAGGCGGCACAACCCCAGTGCCACG |
| | | TTGTGAGTTGGATAGTTGTGGAAAGAGTCAAA |
| | | TGGCTCTCCTCAAGCGTATTCAACAAGGGGCT |
| | | GAAGGATGCCCAGAAGGTACCCCATTGTATGG |
| | | GATCTGATCTGGGGCCTCGGTGCACATGCTTT |
| | | ACATGTGTTTAGTCGAGGTTAAAAAAACGTCT |
| | | AGGCCCCCCGAACCACGGGGACGTGGTTTTCC |
| | | TTTGAAAAACACGATGATAATATGGCCACAAC |
| | | C |
| IRES-2 | 1733 | TAACGAATTCCGCCCCTCTCCCCCCCCCCCCT |
| | | CTCCCTCCCCCCCCCCTAACGTTACTGGCCGA |
| | | AGCCGCTTGGAATAAGGCCGGTGTGCGTTTGT |
| | | CTATATGTTATTTTCCACCATATTGCCGTCTT |
| | | TTGGCAATGTGAGGGCCCGGAAACCTGGCCCT |
| | | GTCTTCTTGACGAGCATTCCTAGGGGTCTTTC |
| | | CCCTCTCGCCAAAGGAATGCAAGGTCTGTTGA |
| | | ATGTCGTGAAGGAAGCAGTTCCTCTGGAAGCT |
| | | TCTTGAAGACAAACAACGTCTGTAGCGACCCT |
| | | TTGCAGGCAGCGGAACCCCCCACCTGGCGACA |
| | | GGTGCCTCTGCGGCCAAAAGCCACGTGTATAA |
| | | GATACACCTGCAAAGGCGGCACAACCCCAGTG |
| | | CCACGTTGTGAGTTGGATAGTTGTGGAAAGAG |
| | | TCAAATGGCTCTCCTCAAGCGTATTCAACAAG |
| | | GGGCTGAAGGATGCCCAGAAGGTACCCCATTG |
| | | TATGGGATCTGATCTGGGGCCTCGGTGCACAT |
| | | GCTTTACATGTGTTTAGTCGAGGTTAAAAAAA |
| | | CGTCTAGGCCCCCCGAACCACGGGGACGTGGT |
| | | TTTCCTTTGAAAAACACGATGATAATATGGCC |
| | | ACAACCGCCGCCACC |
| hIgG2 | 1734 | GTGGAGAGGAAGTGCTGCGTGGAGTGCCCACC |
| hinge | | ATGCCCTGCCCCTCCTGTGGCC |
| hIgG3 | 1735 | GAGCTCAAAACCCCACTTGGTGACACAACTCA |
| hinge | | CACATGCCCACGGTGCCCAGAGCCCAAATCTT |
| | | GTGACACACCTCCCCCGTGCCCACGGTGCCCA |
| | | GCACCTGAACTC |
| hIgG3-2 | 1736 | GAGCTCAAAACCCCACTTGGTGACACAACTCA |
| hinge | | CACATGCCCACGGTGCCCAGAGCCCAAATCTT |
| | | GTGACACACCTCCCCCGTGCCCACGGTGCCCA |
| | | GAGCCCAAATCTTGTGACACACCTCCCCCATG |
| | | CCCACGGTGCCCAGCACCTGAACTC |
| hIgG3-3 | 1737 | GAGCTCAAAACCCCACTTGGTGACACAACTCA |
| hinge | | CACATGCCCACGGTGCCCAGAGCCCAAATCTT |
| | | GTGACACACCTCCCCCGTGCCCACGGTGCCCA |
| | | GAGCCCAAATCTTGTGACACACCTCCCCCATG |
| | | CCCACGGTGCCCAGAGCCCAAATCTTGTGACA |
| | | CACCTCCCCCGTGCCCAAGGTGCCCAGCACCT |
| | | GAACTC |
| msiGG-1 | 1738 | GTGCCCAGGGATTGTGGTTGTAAGCCTTGCAT |
| hinge | | ATGTACAGTCCCA |
| msiGG1 | 1739 | GTGCCCAGGGATTGTGGT |
| hinge | | |
| HigG3 | 2244 | GAGCTCAAAACCCCACTTGGTGACACAACTCA |
| hinge | | CACATGCCCACGGTGCCCAGAGCCCAAATCTT |
| | | GTGACACACCTCCCCCGTGCCCACGGTGCCCA |
| | | GAGCCCAAATCTTGTGACACAACTCACACATG |
| | | CCCACGGTGCCCAGAGCCCAAATCTTGTGACA |
| | | CACCTCCCCCGTGCCCAAGGTGCCCAGCACCT |
| | | GAACTC |
| G4S | 2245 | GGTGGTGGTGGATCC |
| (SEQ ID | | |
| NO: | | |
| 5442) | | |
| (G4S)2 | 2246 | GGTGGTGGTGGATCCGGTGGTGGTGGATCC |
| (SEQ ID | | |
| NO: | | |
| 5443) | | |
| (G4S)3 | 2247 | GGTGGTGGTGGATCCGGTGGTGGTGGATCCGG |
| (SEQ ID | | TGGTGGTGGATCC |
| NO: | | |
| 1470) | | |
| (G4S)4 | 2248 | GGTGGTGGTGGATCCGGTGGTGGTGGATCCGG |
| (SEQ ID | | TGGTGGTGGATCCGGTGGTGGTGGATCC |
| NO: | | |
| 5444) | | |
| (G4S)5 | 2249 | GGTGGTGGTGGTAGCGGCGGCGGCGGCTCTGG |
| (SEQ ID | | TGGTGGTGGATCCGGTGGTGGTGGATCCGGTG |
| NO: | | GTGGTGGATCC |
| 5441) | | |
| (G4S)5 | 2250 | GGTGGTGGTGGATCCGGTGGTGGTGGATCCGG |
| (SEQ ID | | TGGTGGTGGATCCGGTGGTGGTGGATCCGGTG |
| NO: | | GTGGTGGATCC |
| 5441) | | |
| (G4S)6 | 2251 | GGTGGTGGTGGTAGCGGCGGCGGCGGCTCTGG |
| (SEQ ID | | TGGTGGTGGATCCGGTGGTGGTGGATCCGGTG |
| NO: | | GTGGTGGATCCGGTGGTGGTGGATCC |
| 5445) | | |
| (G4S)8 | 2252 | GGTGGTGGTGGTAGCGGCGGCGGCGGCTCTGG |
| (SEQ ID | | TGGTGGTGGATCCGGTGGTGGTGGATCCGGTG |
| NO: | | GTGGTGGATCCGGTGGTGGTGGATCCGGTGGT |
| 5446) | | GGTGGATCCGGTGGTGGTGGATCC |
| (G4S)8 | 2253 | GGTGGTGGTGGATCCGGTGGTGGTGGATCCGG |
| (SEQ ID | | TGGTGGTGGATCCGGTGGTGGTGGATCCGGTG |
| NO: | | GTGGTGGATCCGGTGGTGGTGGATCCGGTGGT |
| 5446) | | GGTGGATCCGGTGGTGGTGGATCC |
| (G4S)4 | 2254 | GGTGGTGGTGGTAGCGGCGGCGGCGGCTCTGG |
| (SEQ ID | | TGGTGGTGGATCCGGTGGTGGTGGATCC |
| NO: | | |
| 5444) | | |
| (G4S)6 | 2259 | GGTGGTGGTGGATCCGGTGGTGGTGGATCCGG |
| (SEQ ID | | TGGTGGTGGATCCGGTGGTGGTGGATCCGGTG |
| NO: | | GTGGTGGATCCGGTGGTGGTGGATCC |
| 5445) | | |
| G4S | 1455 | GGAGGAGGAGGAAGT |
| (SEQ ID | | |
| NO: | | |
| 5442) | | |
| G4S | 1457 | GGAGGTGGAGGTTCT |
| (SEQ ID | | |
| NO: | | |
| 5442) | | |
| GS | | GGCTCT |
| (G4S)3 | 1469 | GGTGGTGGTGGATCCGGAGGAGGAGGAAGTGG |
| (SEQ ID | | AGGTGGAGGTTCT |
| NO: | | |
| 1470) | | |
| (G4S)3 | 1470 | GGGGSGGGGSGGGGS |
| (SEQ ID | | |
| NO: | | |
| 1470) | | |

[1491] In some embodiments, exemplary linker sequences of any of the constructs described herein include SEQ ID NOS 1455 and 1456; SEQ ID NOS 1457 and 1458; SEQ ID NO: 5243; SEQ ID NO: 1469; SEQ ID NO: 1470.

[1492] In some embodiments, any of the antibodies described herein can have a linker, e.g., a flexible polypeptide linker, of varying lengths, connecting the variable domains (e.g., the VH and the VL) of the antigen binding domain of the antibody. For example, a (Gly4-Ser)n linker, wherein n is 0, 1, 2, 3, 4, 5, 6, 7, or 8 (SEQ ID NO: 5447) can be used (e.g., any one of SEQ ID NOs: 1730-1731, 2245-2254, 2259, 1455-1458, 1469, or 1470). In some embodiments, the antibody binds to tau.

[1493] In some embodiments, the encoded linker comprises an enzymatic cleavage site, e.g., for intracellular and/or extracellular cleavage. In some embodiments, the linker is cleaved to separate the VH and the VL of the antigen binding domain and/or the heavy chain and light chain of the antibody or fragment thereof (e.g., an anti-tau antibody). In some embodiments, the encoded linker comprises a furin linker or a functional variant. In some embodiments, the nucleotide sequence encoding the furin linker comprises the nucleotide sequence of SEQ ID NO: 1724, or a nucleotide sequence with at least 70%, 75%, 80%, 85%, 90%, 95%, or 99% sequence identity thereto. In some embodiments, furin cleaves proteins downstream of a basic amino acid target sequence (e.g., Arg-X-(Arg/Lys)-Arg) (e.g., as described in Thomas, G., 2002. Nature Reviews Molecular Cell Biology 3(10): 753-66; the contents of which are herein incorporated by reference in its entirety). In some embodiments, the encoded linker comprises a 2A self-cleaving peptide (e.g., a 2A peptide derived from foot-and-mouth disease virus (F2A), porcine teschovirus-1 (P2A), Thoseaasigna virus (T2A), or equine rhinitis A virus (E2A)). In some embodiments, the encoded linker comprises a T2A self-cleaving peptide linker. In some embodiments, the nucleotide sequence encoding the T2A linker comprises the nucleotide sequence of SEQ ID NO: 1726, or a nucleotide sequence with at least 70%, 75%, 80%, 85%, 90%, 95%, or 99% sequence identity thereto. In some embodiments, the nucleic acid encoding the payload encodes a furin linker and a T2A linker.

[1494] In some embodiments, the encoded linkers comprises a cathepsin, a matrix metalloproteinases or a legumain cleavage sites, such as those described e.g. by Cizeau and Macdonald in International Publication No. WO2008052322, the contents of which are herein incorporated in their entirety.

[1495] In some embodiments, the encoded linker comprises an internal ribosomal entry site (IRES) is a nucleotide sequence (>500 nucleotides) for initiation of translation in the middle of a nucleotide sequence, e.g., an mRNA sequence (Kim, J. H. et al., 2011. PLoS One 6(4): e18556; the contents of which are herein incorporated by reference in its entirety), which can be used, for example, to modulate expression of one or more transgenes. In some embodiments, the encode linker comprises a small and unbranched serine-rich peptide linker, such as those described by Huston et al. in U.S. Pat. No. 5,525,491, the contents of which are herein incorporated in their entirety. In some embodiments, polypeptides comprising a serine-rich linker has increased solubility. In some embodiments, the encoded linker comprises an artificial linker, such as those described by Whitlow and Filpula in U.S. Pat. No. 5,856,456 and Ladner et al. in U.S. Pat. No. 4,946,778, the contents of each of which are herein incorporated by their entirety.

### Payload Component: Signal Sequences

[1496] In some embodiments, the nucleotide sequence comprising the transgene encoding the payload, e.g., an antibody or fragment thereof, comprises a nucleotide sequence encoding a signal sequence (e.g., a signal sequence region herein). In some embodiments, the nucleotide sequence comprising the transgene encoding the payload comprises two signal sequence regions. In some embodiments, the nucleotide sequence comprising the transgene encoding the payload comprises three or more signal sequence regions.

[1497] In some embodiments, the nucleotide sequence encoding the signal sequence is located 5′ relative to the nucleotide sequence encoding the VH and/or the heavy chain. In some embodiments, the nucleotide sequence encoding the signal sequence is located 5′ relative to the nucleotide sequence encoding the VL and/or the light chain. In some embodiments, the encoded VH, VL, heavy chain, and/or light chain of the encoded antibody comprises a signal sequence at the N-terminus, wherein the signal sequence is optionally cleaved during cellular processing and/or localization of the antibody.

[1498] In some embodiments, the signal sequence comprises any one of the signal sequences provided in Table 11A or a functional variant thereof. In some embodiments, the encoded signal sequence comprises an amino acid sequence encoded by any one of the nucleotide sequences provided in Table 11A, or an amino acid sequence with at least 70%, 75%, 80%, 85%, 90%, 95%, or 99% sequence identity thereto. In some embodiments, the nucleotide sequence encoding the signal sequence comprises any one of the nucleotide sequences provided in Table 11A, or a nucleotide sequence with at least 70%, 75%, 80%, 85%, 90%, 95%, or 99% sequence identity thereto.

TABLE 11A
Signal Sequence Regions

| | SEQ | |
|---|---|---|
| | ID | |
| Name | NO | Sequence |
| Signal1 | 1451 | ATGGCGACGGGTTCAAGAACTTCCCTACT |
| (hGH-2 | | TCTTGCATTTGGCCTGCTTTGTTTGCCGT |
| (84)) | | GGTTACAGGAGGGCTCGGCAGCTGCC |
| Signal2 | 1452 | GCCGCCACCATGGCGACGGGTTCAAGAAC |
| (hGH-2 | | TTCCCTACTTCTTGCATTTGGCCTGCTTT |
| (93)) | | GTTTGCCGTGGTTACAGGAGGGCTCGGCA |
| | | GCTGCC |
| Signal3 | 1453 | GCCGCCACCATGGGGGTGCACGAATGTCC |
| (EPOh) | | TGCCTGGCTGTGGCTTCTCCTGTCCCTGC |
| | | TGTCGCTCCCTCTGGGCCTCCCAGTCCTG |
| | | GGCGCTGCC |
| Signal4 | 1454 | GCCGCCACCATGGGAGTCAAAGTTCTGTT |
| (Gaussia | | TGCCCTGATCTGCATCGCTGTGGCCGAGG |
| Luc 100) | | CCGCTGCC |
| Signal5 | 1456 | GCCGCCACCATGAAACACCTGTGGTTCTT |
| (H3) | | CCTCCTGCTGGTGGCAGCTCCCAGATGGG |
| | | TCCTGTCCGCTGCC |
| Signal6 | 1458 | GCCGCCACCATGGACCTCCTGCACAAGAA |
| (H8) | | CATGAAACACCTGTGGTTCTTCCTCCTCC |
| | | TGGTGGCAGCTCCCAGATGGGTGCTGTCC |
| | | GCTGCC |
| Signal7 | 1459 | GCCGCCACCATGGCTTTCCTCTGGCTCCT |
| (hCtry59) | | CTCCTGCTGGGCCCTCCTGGGTACCACCT |
| | | TCGGCGCTGCC |
| Signal8 | 1460 | GCCGCCACCATGCCCCCCAAGAAGTGCCT |
| (HMM24) | | GCTGCTGCTGCTGACCCTGCTGCTGCTGA |
| | | TCTCCACCACCTTCGGCGCTGCC |
| Signal9 | 1461 | GCCGCCACCATG |
| (Kozak) | | |
| Signal10 | 1462 | GCCGCCACCATGGACATGAGGGTCCCTGC |
| (L1) | | TCAGCTCCTGGGGCTCCTGCTGCTCTGGC |
| | | TCTCAGGTGCCAGATGTGCTGCC |
| Signal11 | 1463 | GCCGCCACCATGGAAATCAAGGTGCTGTT |
| (Lucia) | | TGCCCTCATCTGTATTGCTGTTGCTGAGG |
| | | CAGCTGCC |
| Signal12 | 1464 | GCCGCCACCATGGAGACAGACACACTCCT |
| (pSEc) | | GCTATGGGTACTGCTGCTCTGGGTTCCAG |
| | | GTTCCACTGGTGACGCTGCC |
| Signal13 | 1465 | ATGAACTTCGGGCTCAGCTTGATTTTCCT |
| (HC | | TGTCCTTGTTTTAAAAGGTGTCCAGTGT |
| signal) | | |
| Signal14 | 1466 | ATGGGATGGAGCTGGATCTTTCTCTTTCT |
| (HC | | CCTGTCAGGAACTACAGGTGTCCTCTCT |
| signal) | | |
| Signal15 | 1467 | ATGAAGTTGCCTGTTAGGCTGTTGGTGCT |
| (LC | | GATGTTCTGGATTCCTGCTTCCAGCAGT |
| signal) | | |
| Signal16 | 1468 | ATGAACTTCGGGCTCAGCTTGATTTTCCT |
| (HC | | TGTCCTTGTTTTAAAAGGTGTCCAGTGTG |
| signal) | | AGGTGAAGCTGGTGGAGAGCGGCGGCGAC |
| | | CTGGTGAAGCCTGGCGGCAGCCTGAAGCT |
| | | GAGCTGCGCCGCCAGCGGCTTCACCTTCA |
| | | GCAGCTACGCCATGAGCTGGGTGAGACAG |
| | | AACCCTGAGAAGAGACTGGAGTGGGTGGC |
| | | CAGCATCAGCAAGGGCGGCAACACCTACT |
| | | ACCCTAACAGCGTGAAGGGCAGATTCACC |
| | | ATCAGCAGAGACAACGCCAGAAACATCCT |
| | | GTACCTGCAGATGAGCAGCCTGAGAAGCG |
| | | AGGACACCGCCCTGTACTACTGCGCCAGA |
| | | GGCTGGGGCGACTACGGCTGGTTCGCCTA |
| | | CTGGGGCCAGGTGACCCTGGTGACCGTGA |
| | | GCGCC |

### II. Formulation and Delivery

### Pharmaceutical Compositions

[1499] Compounds disclosed herein, e.g., an anti-tau antibody or an isolated, e.g., recombinant, AAV particle comprising a viral genome comprising a nucleotide sequence encoding an anti-tau antibody (e.g., an anti-tau antibody described herein) may be prepared as pharmaceutical compositions. As used herein the term “pharmaceutical composition” refers to compositions including at least one active ingredient and, most often, a pharmaceutically acceptable excipient.

[1500] Relative amounts of the active ingredient (e.g. an antibody), a pharmaceutically acceptable excipient, and/or any additional ingredients in a pharmaceutical composition in accordance with the present disclosure may vary, depending upon the identity, size, and/or condition of the subject being treated and further depending upon the route by which the composition is to be administered. For example, the composition may include between 0.1% and 99% (w/w) of the active ingredient. By way of example, the composition may include between 0.1% and 100%, e.g., between 0.5 and 50%, between 1-30%, between 5-80%, at least 80% (w/w) active ingredient.

[1501] Although the descriptions of pharmaceutical compositions provided herein are principally directed to pharmaceutical compositions which are suitable for administration to humans, it will be understood by the skilled artisan that such compositions are generally suitable for administration to any other animal, e.g., to non-human animals, e.g. non-human mammals. Modification of pharmaceutical compositions suitable for administration to humans in order to render the compositions suitable for administration to various animals is well understood, and the ordinarily skilled veterinary pharmacologist can design and/or perform such modification with merely ordinary, if any, experimentation. Subjects to which administration of the pharmaceutical compositions is contemplated include, but are not limited to, humans and/or other primates; mammals, including commercially relevant mammals such as cattle, pigs, horses, sheep, cats, dogs, mice, rats, birds, including commercially relevant birds such as poultry, chickens, ducks, geese, and/or turkeys.

[1502] In some embodiments, compositions are administered to humans, human patients, or subjects.

### Formulations

[1503] Compounds of the present disclosure, e.g., an anti-tau antibody or an isolated, e.g., recombinant, AAV particle comprising a viral genome comprising a nucleotide sequence encoding an anti-tau antibody (e.g., an anti-tau antibody described herein), can be formulated using one or more excipients to: (1) increase stability; (2) increase cell permeability; (3) permit the sustained or delayed release (e.g., from a sustained release formulation); and/or (4) alter the biodistribution (e.g., target an antibody to specific tissues or cell types). In addition to traditional excipients such as any and all solvents, dispersion media, diluents, or other liquid vehicles, dispersion or suspension aids, surface active agents, isotonic agents, thickening or emulsifying agents, preservatives, formulations of the present disclosure can include, without limitation, liposomes, lipid nanoparticles, polymers, lipoplexes, core-shell nanoparticles, peptides, proteins, transfected cells (e.g., for transplantation into a subject) and combinations thereof.

[1504] Pharmaceutical compositions described herein may be prepared by methods known or hereafter developed in the art of pharmacology. Such preparatory methods may include the step of associating the active ingredient with an excipient and/or one or more other accessory ingredients.

[1505] A pharmaceutical composition in accordance with the present disclosure may be prepared, packaged, and/or sold in bulk, as a single unit dose, and/or as a plurality of single unit doses. As used herein, a “unit dose” refers to a discrete amount of the pharmaceutical composition including a predetermined amount of the active ingredient. The amount of the active ingredient is generally equal to the dosage of the active ingredient which would be administered to a subject and/or a convenient fraction of such a dosage such as, for example, one-half or one-third of such a dosage.

[1506] Relative amounts of active ingredient (e.g. antibody), pharmaceutically acceptable excipients, and/or any additional ingredients in pharmaceutical compositions in accordance with the present disclosure may vary, depending upon the identity, size, and/or condition of subjects being treated and further depending upon route of administration. For example, compositions may include between 0.1% and 99% (w/w) of active ingredient. By way of example, compositions may include between 0.1% and 100%, e.g., between 0.5 and 50%, between 1-30%, between 5-80%, or at least 80% (w/w) active ingredient.

[1507] According to the present disclosure, compounds, e.g., an anti-tau antibody or an AAV particle comprising a viral genome comprising a nucleotide sequence encoding an anti-tau antibody (e.g., an anti-tau antibody described herein), may be formulated for CNS delivery. Agents that cross the brain blood barrier may be used. For example, some cell penetrating peptides that can target molecules to the brain blood barrier endothelium may be used for formulation (e.g., Mathupala, Expert Opin Ther Pat., 2009, 19, 137-140; the content of which is incorporated herein by reference in its entirety).

### Excipients and Diluents

[1508] In some embodiments, a pharmaceutically acceptable excipient may be at least 95%, at least 96%, at least 97%, at least 98%, at least 99%, or 100% pure. In some embodiments, an excipient is approved for use for humans and for veterinary use. In some embodiments, an excipient may be approved by the United States Food and Drug Administration. In some embodiments, an excipient may be of pharmaceutical grade. In some embodiments, an excipient may meet the standards of the United States Pharmacopoeia (USP), the European Pharmacopoeia (EP), the British Pharmacopoeia, and/or the International Pharmacopoeia.

[1509] Excipients, as used herein, include, but are not limited to, any and all solvents, dispersion media, diluents, or other liquid vehicles, dispersion or suspension aids, surface active agents, isotonic agents, thickening or emulsifying agents, preservatives, and the like, as suited to the particular dosage form desired. Various excipients for formulating pharmaceutical compositions and techniques for preparation are known in the art (see Remington: The Science and Practice of Pharmacy, 21st Edition, A. R. Gennaro, Lippincott, Williams & Wilkins, Baltimore, MD, 2006; incorporated herein by reference in its entirety). The use of conventional excipient media may be contemplated within the scope of the present disclosure, except insofar as any conventional excipient media may be incompatible with certain substances or their derivatives, such as by producing any undesirable biological effects or otherwise interacting in a deleterious manner with any other component(s) of pharmaceutical compositions of the present disclosure.

[1510] Exemplary diluents include, but are not limited to, calcium carbonate, sodium carbonate, calcium phosphate, dicalcium phosphate, calcium sulfate, calcium hydrogen phosphate, sodium phosphate lactose, sucrose, cellulose, microcrystalline cellulose, kaolin, mannitol, sorbitol, inositol, sodium chloride, dry starch, cornstarch, powdered sugar, etc., and/or combinations thereof.

### Inactive Ingredients

[1511] In some embodiments, formulations of the present disclosure may include at least one inactive ingredient. As used herein, the term “inactive ingredient” refers to an agent that does not contribute to the activity of a pharmaceutical composition. In some embodiments, all, none or some of the inactive ingredients which may be used in formulations of the present disclosure may be approved by the US Food and Drug Administration (FDA).

[1512] Formulations disclosed herein may include cations or anions. Formulations may include Zn²⁺, Ca²⁺, Cu²⁺, Mn²⁺, Mg⁺, or combinations thereof. As a non-limiting example, formulations may include polymers and complexes with metal cations (See e.g., U.S. Pat. Nos. 6,265,389 and 6,555,525, each of which is herein incorporated by reference in its entirety).

### III. Administration and Dosing

### Administration

[1513] Compounds, e.g., an anti-tau antibody or an AAV particle comprising a viral genome comprising a nucleotide sequence encoding an anti-tau antibody (e.g., an anti-tau antibody described herein), and compositions of the present disclosure may be administered by any delivery route which results in a therapeutically effective outcome. These include, but are not limited to, enteral (into the intestine), gastroenteral, epidural (into the dura mater), oral (by way of the mouth), transdermal, intracerebral (into the cerebrum), intracerebroventricular (into the cerebral ventricles), epicutaneous (application onto the skin), intradermal (into the skin itself), subcutaneous (under the skin), nasal administration (through the nose), intravenous (into a vein), intravenous bolus, intravenous drip, intra-arterial (into an artery), intramuscular (into a muscle), intracardiac (into the heart), intraosseous infusion (into the bone marrow), intrathecal (into the spinal canal), intraparenchymal (into the substance of a tissue, e.g., brain tissue), intraperitoneal (infusion or injection into the peritoneum), intravesical infusion, intravitreal (through the eye), intracavernous injection (into a pathologic cavity) intracavitary (into the base of the penis), intravaginal administration, intrauterine, extra-amniotic administration, transdermal (diffusion through the intact skin for systemic distribution), transmucosal (diffusion through a mucous membrane), transvaginal, insufflation (snorting), sublingual, sublabial, enema, eye drops (onto the conjunctiva), ear drops, auricular (in or by way of the ear), buccal (directed toward the cheek), conjunctival, cutaneous, dental (to a tooth or teeth), electro-osmosis, endocervical, endosinusial, endotracheal, extracorporeal, hemodialysis, infiltration, interstitial, intra-abdominal, intra-amniotic, intra-articular, intrabiliary, intrabronchial, intrabursal, intracartilaginous (within a cartilage), intracaudal (within the cauda equine), intracisternal (within the cisterna magna cerebellomedularis), intracorneal (within the cornea), dental intracoronal, intracoronary (within the coronary arteries), intracorporus cavernosum (within the dilatable spaces of the corporus cavernosa of the penis), intradiscal (within a disc), intraductal (within a duct of a gland), intraduodenal (within the duodenum), intradural (within or beneath the dura), intraepidermal (to the epidermis), intraesophageal (to the esophagus), intragastric (within the stomach), intragingival (within the gingivae), intraileal (within the distal portion of the small intestine), intralesional (within or introduced directly to a localized lesion), intraluminal (within a lumen of a tube), intralymphatic (within the lymph), intramedullary (within the marrow cavity of a bone), intrameningeal (within the meninges), intramyocardial (within the myocardium), intraocular (within the eye), intraovarian (within the ovary), intrapericardial (within the pericardium), intrapleural (within the pleura), intraprostatic (within the prostate gland), intrapulmonary (within the lungs or its bronchi), intrasinal (within the nasal or periorbital sinuses), intraspinal (within the vertebral column), intrasynovial (within the synovial cavity of a joint), intratendinous (within a tendon), intratesticular (within the testicle), intrathecal (within the cerebrospinal fluid at any level of the cerebrospinal axis), intrathoracic (within the thorax), intratubular (within the tubules of an organ), intratumor (within a tumor), intratympanic (within the aurus media), intravascular (within a vessel or vessels), intraventricular (within a ventricle), iontophoresis (by means of electric current where ions of soluble salts migrate into the tissues of the body), irrigation (to bathe or flush open wounds or body cavities), laryngeal (directly upon the larynx), nasogastric (through the nose and into the stomach), occlusive dressing technique (topical route administration which is then covered by a dressing which occludes the area), ophthalmic (to the external eye), oropharyngeal (directly to the mouth and pharynx), parenteral, percutaneous, periarticular, peridural, perineural, periodontal, rectal, respiratory (within the respiratory tract by inhaling orally or nasally for local or systemic effect), retrobulbar (behind the pons or behind the eyeball), soft tissue, subarachnoid, subconjunctival, submucosal, topical, transplacental (through or across the placenta), transtracheal (through the wall of the trachea), transtympanic (across or through the tympanic cavity), ureteral (to the ureter), urethral (to the urethra), vaginal, caudal block, diagnostic, nerve block, biliary perfusion, cardiac perfusion, photopheresis, and spinal.

[1514] In some embodiments, compositions may be administered in a way which allows them to cross the blood-brain barrier, vascular barrier, or other epithelial barrier. Compounds, e.g., an anti-tau antibody or an AAV particle comprising a viral genome comprising a nucleotide sequence encoding an anti-tau antibody (e.g., an anti-tau antibody described herein), and compositions of the present disclosure may be administered in any suitable form, including, but not limited to, as a liquid solution, as a suspension, or as a solid form suitable for liquid solution or suspension in a liquid solution.

[1515] In some embodiments, delivery to a subject may be via a single route administration. In some embodiments, delivery to a subject may be via multi-site route of administration. Administration may include a bolus infusion. Administration may include sustained delivery over a period of minutes, hours, or days. Administration by infusion may include an infusion rate that may be changed depending on the subject, distribution, formulation, or other delivery parameter. Administration may be by more than one route of administration. As non-limiting examples, combination administrations may include intrathecal and intracerebroventricular administration, or intravenous and intraparenchymal administration.

### Intravenous Administration

[1516] Compounds, e.g., an anti-tau antibody or an AAV particle comprising a viral genome comprising a nucleotide sequence encoding an anti-tau antibody (e.g., an anti-tau antibody described herein), and compositions of the present disclosure may be administered to a subject by systemic administration. Systemic administration may include intravenous administration. Systemic administration may include intraarterial administration.

[1517] Compounds, e.g., an anti-tau antibody or an AAV particle comprising a viral genome comprising a nucleotide sequence encoding an anti-tau antibody (e.g., an anti-tau antibody described herein), and compositions of the present disclosure may be administered to a subject by intravenous administration. Intravenous administration may be achieved by subcutaneous delivery. Intravenous administration may be achieved by a tail vein injection (e.g., in a mouse model). Intravenous administration may be achieved by retro-orbital injection.

### Administration to the CNS

[1518] Compounds, e.g., an anti-tau antibody or an AAV particle comprising a viral genome comprising a nucleotide sequence encoding an anti-tau antibody (e.g., an anti-tau antibody described herein), and compositions of the present disclosure may be administered to a subject by direct injection into the brain. As a non-limiting example, the brain delivery may be by intrahippocampal administration. Administration may be by intraparenchymal administration. In one embodiment, the intraparenchymal administration is to tissue of the central nervous system. Administration may be by intracranial delivery (See, e.g., U.S. Pat. No. 8,119,611; the content of which is incorporated herein by reference in its entirety). Administration may be by injection into the CSF pathway. Non-limiting examples of delivery to the CSF pathway include intrathecal and intracerebroventricular administration. Administration to the brain may be by systemic delivery. As a non-limiting example, the systemic delivery may be by intravascular administration. As a non-limiting example, the systemic or intravascular administration may be intravenous. Administration may be by intraocular delivery route. A non-limiting example of intraocular administration includes an intravitreal injection.

### Dose and Regimen

[1519] The present disclosure provides methods of administering compounds, e.g., an anti-tau antibody or an AAV particle comprising a viral genome comprising a nucleotide sequence encoding an anti-tau antibody (e.g., an anti-tau antibody described herein), and compositions in accordance with the disclosure to a subject in need thereof. Administration may be in any amount and by any route of administration effective for preventing, treating, managing, or diagnosing diseases, disorders, and/or conditions. The exact amount required may vary from subject to subject, depending on species, age, general condition of the subject, severity of disease, particular composition, mode of administration, mode of activity, and the like. Subjects may be, but are not limited to, humans, mammals, or animals. Compositions may be formulated in unit dosage form for ease of administration and uniformity of dosage. It will be understood, however, that the total daily usage of compositions of the present disclosure may be decided by an attending physician within the scope of sound medical judgment. Specific therapeutically effective, prophylactically effective, or appropriate diagnostic dose levels for any particular individual may vary depending upon a variety of factors including the disorder being treated and severity of the disorder; the activity of specific payloads employed; specific compositions employed; age, body weight, general health, sex, and diet of patients; time of administration, route of administration, and rate of excretion of compounds and compositions employed; duration of treatment; drugs used in combination or coincidental with compounds and compositions employed; and like factors well known in the medical arts.

[1520] In certain embodiments, compounds, e.g., an anti-tau antibody or an AAV particle comprising a viral genome comprising a nucleotide sequence encoding an anti-tau antibody (e.g., an anti-tau antibody described herein) and compositions in accordance with the present disclosure may be administered at dosage levels sufficient to deliver an anti-tau antibody from about 0.0001 mg/kg to about 100 mg/kg, from about 0.001 mg/kg to about 0.05 mg/kg, from about 0.005 mg/kg to about 0.05 mg/kg, from about 0.001 mg/kg to about 0.005 mg/kg, from about 0.05 mg/kg to about 0.5 mg/kg, from about 0.01 mg/kg to about 50 mg/kg, from about 0.1 mg/kg to about 40 mg/kg, from about 0.5 mg/kg to about 30 mg/kg, from about 0.01 mg/kg to about 10 mg/kg, from about 0.1 mg/kg to about 10 mg/kg, or from about 1 mg/kg to about 25 mg/kg, of subject body weight per day, one or more times a day, to obtain the desired therapeutic, diagnostic, or prophylactic, effect.

[1521] In certain embodiments, the desired dosage may be delivered using multiple administrations (e.g., two, three, four, or more than four administrations). When multiple administrations are employed, split dosing regimens such as those described herein may be used. As used herein, a “split dose” is the division of “single unit dose” or total daily dose into two or more doses, e.g., two or more administrations of the “single unit dose”. As used herein, a “single unit dose” is a dose of any therapeutic administered in one dose/at one time/single route/single point of contact, i.e., single administration event.

[1522] Compounds, e.g., an anti-tau antibody or an AAV particle comprising a viral genome comprising a nucleotide sequence encoding an anti-tau antibody (e.g., an anti-tau antibody described herein), and compositions of the present disclosure may be administered as a “pulse dose” or as a “continuous flow.” As used herein, a “pulse dose” is a series of single unit doses of any therapeutic agent administered with a set frequency over a period of time. As used herein, a “continuous flow” is a dose of therapeutic agent administered continuously for a period of time in a single route/single point of contact, i.e., continuous administration event. A total daily dose, an amount given or prescribed in a 24-hour period, may be administered by any of these methods, or as a combination of these methods, or by any other methods suitable for pharmaceutical administration.

### Combinations

[1523] Compounds, e.g., an anti-tau antibody or an isolated, e.g., recombinant, AAV particle comprising a viral genome comprising a nucleotide sequence encoding an anti-tau antibody (e.g., an anti-tau antibody described herein), and compositions of the present disclosure may be used in combination with one or more other therapeutic, prophylactic, research or diagnostic agents. By “in combination with,” it is not intended to imply that the agents must be administered at the same time and/or formulated for delivery together, although these methods of delivery are within the scope of the present disclosure. Compositions can be administered concurrently with, prior to, or subsequent to, one or more other desired therapeutics or medical procedures. In general, each agent will be administered at a dose and/or on a time schedule determined for that agent. In some embodiments, the present disclosure encompasses the delivery of pharmaceutical, prophylactic, research, or diagnostic compositions in combination with agents that may improve their bioavailability, reduce and/or modify their metabolism, inhibit their excretion, and/or modify their distribution within the body.

### IV. Methods and Uses of the Compositions

[1524] In some embodiments, the present disclosure provides methods related to using and evaluating compounds, e.g., an anti-tau antibody or an AAV particle comprising a viral genome comprising a nucleotide sequence encoding an anti-tau antibody (e.g., an anti-tau antibody described herein), and compositions for therapeutic and diagnostic applications.

### Therapeutic Applications

[1525] In some embodiments, methods of the present disclosure include methods of treating therapeutic indications using compounds, e.g., an anti-tau antibody or an AAV particle comprising a viral genome comprising a nucleotide sequence encoding an anti-tau antibody (e.g., an anti-tau antibody described herein), and/or compositions disclosed herein. As used herein, the term “therapeutic indication” refers to any symptom, condition, disorder, or disease that may be alleviated, stabilized, improved, cured, or otherwise addressed by some form of treatment or other therapeutic intervention. In some embodiments, methods of the present disclosure include treating therapeutic indications by administering antibodies disclosed herein, or an AAV particle comprising a viral genome comprising a nucleotide sequence encoding an anti-tau antibody (e.g., an anti-tau antibody described herein). In some embodiments, the therapeutic indication is a neurological, e.g., neurodegenerative disorder, a disease associated with tau expression or activity, and/or a tau-related disease (e.g., a tauopathy).

[1526] As used herein the terms “treat,” “treatment,” and the like, refer to relief from or alleviation of pathological processes. In the context of the present disclosure insofar as it relates to any of the other conditions recited herein below, the terms “treat,” “treatment,” and the like mean to relieve or alleviate at least one symptom associated with such condition, or to slow or reverse the progression or anticipated progression of such condition.

[1527] By “lower” or “reduce” in the context of a disease marker or symptom is meant a significant decrease in such a level, often statistically significant. The decrease may be, for example, at least 10%, at least 20%, at least 30%, at least 40% or more, and is preferably down to a level accepted as within the range of normal for an individual without such a disorder.

[1528] By “increase” or “raise” in the context of a disease marker or symptom is meant a significant rise in such level, often statistically significant. The increase may be, for example, at least 10%, at least 20%, at least 30%, at least 40% or more, and is preferably up to a level accepted as within the range of normal for an individual without such disorder.

[1529] Efficacy of treatment or amelioration of disease can be assessed, for example by measuring disease progression, disease remission, symptom severity, reduction in pain, quality of life, dose of a medication required to sustain a treatment effect, level of a disease marker or any other measurable parameter appropriate for a given disease being treated or targeted for prevention. It is well within the ability of one skilled in the art to monitor efficacy of treatment or prevention by measuring any one of such parameters, or any combination of parameters. In connection with the administration of a compound or composition described herein, “effective against” a disease or disorder indicates that administration in a clinically appropriate manner results in a beneficial effect for at least a fraction of patients, such as an improvement of symptoms, a cure, a reduction in disease load, reduction in protein aggregation, reduction in neurofibrillary tangles, reduction in neurodegeneration, extension of life, improvement in quality of life, or other effect generally recognized as positive by medical doctors familiar with treating the particular type of disease or disorder.

[1530] A treatment or preventive effect is evident when there is a significant improvement, often statistically significant, in one or more parameters of disease status, or by a failure to worsen or to develop symptoms where they would otherwise be anticipated. As an example, a favorable change of at least 10% in a measurable parameter of disease, and preferably at least 20%, 30%, 40%, 50% or more may be indicative of effective treatment. Efficacy for a given compound or composition may also be judged using an experimental animal model for the given disease as known in the art. When using an experimental animal model, efficacy of treatment is evidenced when a statistically significant modulation in a marker or symptom is observed.

[1531] Compounds of the present disclosure, e.g., an anti-tau antibody or an AAV particle comprising a viral genome comprising a nucleotide sequence encoding an anti-tau antibody (e.g., an anti-tau antibody described herein), and additional therapeutic agents and/or therapies can be administered in combination. Such combinations may be in the same composition, or the additional therapeutic agents can be administered as part of a separate composition or by another method described herein. In some embodiments, the additional therapeutic agent and/or therapy is a therapeutic agent and/or therapy that is suitable for treating or preventing a neurological, e.g., neurodegenerative disorder, a disease associated with tau expression or activity, and/or a tau-related disease (e.g., a tauopathy). In some embodiments, the additional therapeutic agent and/or therapy is a cholinesterase inhibitor (e.g., donepezil, rivastigmine, and/or galantamine), an N-methyl D-aspartate (NMDA) antagonist (e.g., memantine), an antipsychotic drug, an anti-anxiety drug, an anticonvulsant, a dopamine agonist (e.g., pramipexole, ropinirole, rotigotine, and/or apomorphine), an MAO B inhibitor (e.g., selegiline, rasagiline, and/or safinamide), catechol O-methyltransferase (COMT) inhibitors (entacapone, opicapone, and/or tolcapone), anticholinergics (e.g., benztropine and/or trihexyphenidyl), amantadine, carbidopa-levodopa, deep brain simulation (DBS), or a combination thereof.

[1532] In some embodiments, therapeutic indications that may be addressed by methods of the present disclosure include neurological indications. As used herein, a “neurological indication” refers to any therapeutic indication relating to the central nervous system (CNS). Methods of treating neurological indications according to the present disclosure may include administering compounds (e.g., antibodies) and/or compositions described herein. Neurological indications may include neurological diseases and/or disorders involving irregular expression or aggregation of tau. Such indications may include, but are not limited to neurodegenerative disease, Alzheimer's disease (AD), frontotemporal dementia and parkinsonism linked to chromosome 17 (FTDP-17), frontotemporal lobar degeneration (FTLD), frontotemporal dementia (FTD), chronic traumatic encephalopathy (CTE), progressive supranuclear palsy (PSP), Down's syndrome, Pick's disease, corticobasal degeneration (CBD), corticobasal syndrome, amyotrophic lateral sclerosis (ALS), a prion disease, Creutzfeldt-Jakob disease (CJD), multiple system atrophy, tangle-only dementia, stroke, and progressive subcortical gliosis.

[1533] In some embodiments, methods of treating neurological diseases and/or disorders in a subject in need thereof may include one or more of the steps of: (1) deriving, generating, and/or selecting an anti-tau antibody or fragment, or an AAV particle comprising a viral genome comprising a nucleotide sequence encoding an anti-tau antibody (e.g., an anti-tau antibody described herein), or composition thereof; and (2) administering the anti-tau antibody or fragment, or an AAV particle comprising a viral genome comprising a nucleotide sequence encoding an anti-tau antibody (e.g., an anti-tau antibody described herein), or composition thereof to the subject. Administration to the subject may slow, stop, or reverse disease progression. As a non-limiting example, disease progression may be measured by cognitive tests such as, but not limited to, the Mini-Mental State Exam (MMSE) or other similar diagnostic tool(s), known to those skilled in the art. As another non-limiting example, disease progression may be measured by change in the pathological features of the brain, CSF or other tissues of the subject, such as, but not limited to a decrease in levels of tau (either soluble or insoluble). In some embodiments, levels of insoluble hyperphosphorylated tau are decreased. In some embodiments, levels of soluble tau are decreased. In some embodiments, both soluble and insoluble tau are decreased. In some embodiments, levels of insoluble hyperphosphorylated tau are increased. In some embodiments, levels of soluble tau are increased. In some embodiments, both insoluble and soluble tau levels are increased. In some embodiments, neurofibrillary tangles are decreased in size, number, density, or combination thereof. In another embodiment, neurofibrillary tangles are increased in size, number, density or combination thereof.

### Neurodegeneration

[1534] Neurodegenerative disease refers to a group of conditions characterized by progressive loss of neuronal structure and function, ultimately leading to neuronal cell death. Neurons are the building blocks of the nervous system(s) and are generally not able to reproduce and/or be replaced, and therefore neuron damage and/or death is especially devastating. Other, non-degenerating diseases that lead to neuronal cell loss, such as stroke, have similarly debilitating outcomes. Targeting molecules that contribute to deteriorating cell structure or function may prove beneficial generally for treatment of neurological indications, including neurodegenerative disease and stroke.

[1535] Certain molecules are believed to have inhibitory effects on neurite outgrowth, contributing to the limited ability of the central nervous system to repair damage. Such molecules include, but are not limited to, myelin associated proteins, such as, but not limited to, RGM (Repulsive guidance molecule), NOGO (Neurite outgrowth inhibitor), NOGO receptor, MAG (myelin associated glycoprotein), and MAI (myelin associated inhibitor). In some embodiments, anti-tau antibodies of the present disclosure may be utilized to target the aforementioned antigens (e.g., neurite outgrowth inhibitors).

[1536] Many neurodegenerative diseases are associated with aggregation of misfolded proteins, including, but not limited to, alpha synuclein, tau (as in tauopathies), amyloid β, prion proteins, TDP-43, and huntingtin (see, e.g. De Genst et al., 2014, Biochim Biophys Acta; 1844(11):1907-1919, and Yu et al., 2013, Neurotherapeutics.; 10(3): 459-472, references therein, all of which are herein incorporated by reference in their entirety). The aggregation results from disease-specific conversion of soluble proteins to an insoluble, highly ordered fibrillary deposit. This conversion is thought to prevent the proper disposal or degradation of misfolded proteins, thereby leading to further aggregation. Conditions associated with alpha synuclein misfolding and aggregation are referred to as “synucleinopathies.” In some embodiments, anti-tau antibodies of the present disclosure may be utilized to target misfolded or aggregated proteins.

### Alzheimer's Disease

[1537] Alzheimer Disease (AD) is a debilitating neurodegenerative disease currently afflicting more than 35 million people worldwide, with that number expected to double in coming decades. Symptomatic treatments have been available for many years but these treatments do not address the underlying pathophysiology. Recent clinical trials using these and other treatments have largely failed and, to date, no known cure has been identified.

[1538] The AD brain is characterized by the presence of two forms of pathological aggregates, the extracellular plaques composed of β-amyloid (Aβ) and the intracellular neurofibrillary tangles (NFT) comprised of hyperphosphorylated microtubule associated protein tau. Based on early genetic findings, β-amyloid alterations were thought to initiate disease, with changes in tau considered downstream. Thus, most clinical trials have been Aβ-centric. Although no mutations of the tau gene have been linked to AD, such alterations have been shown to result in a family of dementias known as tauopathies, demonstrating that changes in tau can contribute to neurodegenerative processes. Tau is normally a very soluble protein known to associate with microtubules based on the extent of its phosphorylation. Hyperphosphorylation of tau depresses its binding to microtubules and microtubule assembly activity. In tauopathies, the tau becomes hyperphosphorylated, misfolds and aggregates as NFT of paired helical filaments (PHF), twisted ribbons or straight filaments. In AD, NFT pathology, rather than plaque pathology, correlates more closely with neuropathological markers such as neuronal loss, synaptic deficits, severity of disease and cognitive decline. NFT pathology marches through the brain in a stereotyped manner and animal studies suggest a trans-cellular propagation mechanism along neuronal connections.

[1539] Several approaches have been proposed for therapeutically interfering with progression of tau pathology and preventing the subsequent molecular and cellular consequences. Given that NFT are composed of a hyperphosphorylated, misfolded and aggregated form of tau, interference at each of these stages has yielded the most avidly pursued set of targets. Introducing agents that limit phosphorylation, block misfolding or prevent aggregation have all generated promising results. Passive and active immunization with late stage anti-phospho-tau antibodies in mouse models have led to dramatic decreases in tau aggregation and improvements in cognitive parameters. It has also been suggested that introduction of anti-tau antibodies can prevent the trans-neuronal spread of tau pathology.

[1540] In some embodiments, anti-tau antibodies of the present disclosure, or an AAV particle comprising a viral genome comprising a nucleotide sequence encoding an anti-tau antibody (e.g., an anti-tau antibody described herein), may be used according to methods presented herein to treat subjects suffering from AD and other tauopathies. In some cases, methods of the present disclosure may be used to treat subjects suspected of developing AD or other tauopathies.

### Frontotemporal Dementia and Parkinsonism Linked to Chromosome 17 (FTDP-17)

[1541] Although Alzheimer's disease is, in part, characterized by the presence of tau pathology, no known mutations in the tau gene have been causally linked to the disease. Mutations in the tau gene have been shown to lead to an autosomal dominantly inherited tauopathy known as frontotemporal dementia and parkinsonism linked to chromosome 17 (FTDP-17) and demonstrate that alterations in tau can lead to neurodegenerative changes in the brain. Mutations in the tau gene that lead to FTDP-17 are thought to influence splicing patterns, thereby leading to an elevated proportion of tau with four microtubule binding domains (rather than three). These molecules are considered to be more amyloidogenic, meaning they are more likely to become hyperphosphorylated and more likely to aggregate into NFT (Hutton, M. et al., 1998, Nature 393(6686):702-5, the contents of which are herein incorporated by reference in their entirety). Although physically and behaviorally, FTDP-17 patients can appear quite similar to Alzheimer's disease patients, at autopsy FTDP-17 brains lack the prominent AR plaque pathology of an AD brain (Gotz, J. et al., 2012, British Journal of Pharmacology 165(5):1246-59, the contents of which are herein incorporated by reference in their entirety). Therapeutically targeting the aggregates of tau protein may ameliorate and prevent degenerative changes in the brain and potentially lead to improved cognitive ability.

[1542] As of today, there is no treatment to prevent, slow the progression, or cure FTDP-17. Medication may be prescribed to reduce aggressive, agitated or dangerous behavior. There remains a need for therapy affecting the underlying pathophysiology, such as antibody therapies targeting tau protein.

[1543] In some embodiments, anti-tau antibodies of the present disclosure, or an AAV particle comprising a viral genome comprising a nucleotide sequence encoding an anti-tau antibody (e.g., an anti-tau antibody described herein), may be used to treat subjects suffering from FTDP-17. In some cases, methods of the present disclosure may be used to treat subjects suspected of developing FTDP-17.

### Chronic Traumatic Encephalopathy

[1544] Unlike the genetically linked tauopathies, chronic traumatic encephalopathy is a degenerative tauopathy linked to repeated head injuries. The disease was first described in boxers whom behaved “punch drunk” and has since been identified primarily in athletes that play American football, ice hockey, wrestling and other contact sports. The brains of those suffering from CTE are characterized by distinctive patterns of brain atrophy accompanied by accumulation of hyperphosphorylated species of aggregated tau in NFT. In CTE, pathological changes in tau are accompanied by a number of other pathobiological processes, such as inflammation (Daneshvar, D. H. et al., 2015 Mol Cell Neurosci 66(Pt B): 81-90, the contents of which are herein incorporated by reference in their entirety). Targeting the tau aggregates may provide reprieve from the progression of the disease and may allow cognitive improvement.

[1545] As of today, there is no medical therapy to treat or cure CTE. The condition is only diagnosed after death, due to lack of in vivo techniques to identify CTE specific biomarkers. There remains a need for therapy affecting the underlying pathophysiology, such as antibody therapies targeting tau protein.

[1546] In some embodiments, anti-tau antibodies of the present disclosure, or an AAV particle comprising a viral genome comprising a nucleotide sequence encoding an anti-tau antibody (e.g., an anti-tau antibody described herein), may be used to treat subjects suffering from CTE. In some cases, methods of the present disclosure may be used to treat subjects suspected of developing CTE.

### Prion Diseases

[1547] Prion diseases, also known as transmissible spongiform encephalopathies (TSEs), are a group of rare progressive conditions affecting the nervous system. The related conditions are rare and are typically caused by mutations in the PRNP gene which enables production of the prion protein. Gene mutations lead to an abnormally structured prion protein. Alternatively, the abnormal prion may be acquired by exposure from an outside source, e.g., by consumption of beef products containing the abnormal prion protein. Abnormal prions are misfolded, causing the brain tissue to degenerate rapidly. Prion diseases include, but are not limited to, Creutzfeldt-Jakob disease (CJD), Gerstmann-Straussler-Scheinker syndrome (GSS), fatal insomnia (FFI), variably protease-sensitive prionopathy (VPSPr), and kuru. Prion diseases are rare. Approximately 350 cases of prion diseases are diagnosed in the US annually.

[1548] CJD is a degenerative brain disorder characterized by problems with muscular coordination, personality changes including mental impairment, impaired vision, involuntary muscle jerks, weakness and eventually coma. The most common categories of CJD are sporadic, hereditary due to a genetic mutation, and acquired. Sporadic CJD is the most common form affecting people with no known risk factors for the disease. The acquired form of CJD is transmitted by exposure of the brain and nervous system tissue to the prion. As an example, variant CJD (vCDJ) is linked to a bovine spongiform encephalopathy (BSE), also known as a ‘mad cow’ disease. CJD is fatal and patients typically die within one year of diagnosis.

[1549] Prion diseases are associated with an infectious agent consisting of an alternative conformational isoform of the prion protein, PrPSc. PrPSc replication is considered to occur through an induction of the infectious prion in the normal prion protein (PrPC). The replication occurs without a nucleic acid.

[1550] As of today, there is no therapy to manage or cure CJD, or other prion diseases. Typically, treatment is aimed at alleviating symptoms and increasing comfort of the patient, e.g. with pain relievers. There remains a need for therapy affecting the underlying pathophysiology.

[1551] In some embodiments, anti-tau antibodies of the present disclosure, or an AAV particle comprising a viral genome comprising a nucleotide sequence encoding an anti-tau antibody (e.g., an anti-tau antibody described herein), may be used to treat subjects suffering from a prion disease. In some cases, methods of the present disclosure may be used to treat subjects suspected of developing a prion disease.

### Diagnostic Applications

[1552] In some embodiments, compounds (e.g., anti-tau antibodies, or an AAV particle comprising a viral genome comprising a nucleotide sequence encoding an anti-tau antibody (e.g., an anti-tau antibody described herein), and compositions of the present disclosure may be used as diagnostics. Anti-tau antibodies, or an AAV particle comprising a viral genome comprising a nucleotide sequence encoding an anti-tau antibody (e.g., an anti-tau antibody described herein), may be used to identify, label, or stain cells, tissues, organs, etc. expressing tau proteins. Anti-tau antibodies, or an AAV particle comprising a viral genome comprising a nucleotide sequence encoding an anti-tau antibody (e.g., an anti-tau antibody described herein), may be used to identify tau proteins present in tissue sections (e.g., histological tissue sections), including tissue known or suspected of having tau protein aggregates. Such antibodies or AAV particles may in some cases be used to identify subjects with neurological diseases and/or disorders. Tissue sections may be from CNS tissue.

[1553] In some embodiments, diagnostic methods of the present disclosure may include the analysis of one or more cells or tissues using immunohistochemical techniques. Such methods may include the use of one or more of any of the anti-tau antibodies described herein, or an AAV particle comprising a viral genome comprising a nucleotide sequence encoding an anti-tau antibody (e.g., an anti-tau antibody described herein). Immunohistochemical methods may include staining tissue sections to determine the presence and/or level of one or more tau proteins or other markers. Tissue sections may be derived from subject CNS tissue (e.g., patient CNS, animal CNS, and CNS from animal models of disease). Tissue sections may come from formalin-fixed or unfixed fresh frozen tissues. In some cases, tissue sections come from formalin fixed paraffin-embedded (FFPE) tissues. Anti-tau antibodies described herein may be used as primary antibodies. Primary antibodies are used to contact tissue sections directly and bind to target epitopes. Primary antibodies may be directly conjugated with a detectable label or may be detected through the use of a detection agent such as a secondary antibody. In some embodiments, primary antibodies or detection agents include an enzyme that can be used to react with a substrate to generate a visible product (e.g., precipitate). Such enzymes may include, but are not limited to horse radish peroxidase, alkaline phosphatase, beta-galactosidase, and catalase.

[1554] Anti-tau antibodies described herein, or an AAV particle comprising a viral genome comprising a nucleotide sequence encoding an anti-tau antibody (e.g., an anti-tau antibody described herein), may be used according to immunohistochemical methods of the present disclosure to detect tau proteins in tissues or cells. In some cases, these antibodies (e.g., vectorized anti-tau antibodies) are used to detect and/or determine the level of tau proteins in tissues. Levels of anti-tau antibodies used in immunohistochemical staining techniques may be varied to increase visible staining or to decrease background levels of staining. In some embodiments, antibody concentrations of from about 0.01 pg/ml to about 50 μg/ml are used. For example, antibody concentrations of from about 0.01 pg/ml to about 1 μg/ml, from about 0.05 pg/ml to about 5 μg/ml, from about 0.1 pg/ml to about 3 μg/ml, from about 1 μg/ml to about 10 μg/ml, from about 2 μg/ml to about 20 μg/ml, from about 3 μg/ml to about 25 μg/ml, from about 4 μg/ml to about 30 μg/ml, or from about 5 μg/ml to about 50 μg/ml may be used.

[1555] Levels and/or identities of tau proteins may be determined according to any methods known in the art for identifying proteins and/or quantitating protein levels. In some embodiments, such methods may include, but are not limited to mass spectrometry, array analysis (e.g., antibody array or protein array), Western blotting, flow cytometry, immunoprecipitation, surface plasmon resonance analysis, and ELISA. Tau proteins may in some cases be immunoprecipitated from samples prior to analysis. Such immunoprecipitation may be carried out using anti-tau antibodies disclosed herein. In some embodiments, tau proteins are immunoprecipitated from biological samples using anti-tau antibodies and then identified and/or quantitated using mass spectrometry.

[1556] In some embodiments, a method for detecting tau (e.g., human tau) using the antibodies described herein comprises: (a) contacting a sample (e.g., a biological sample such as a tissue section) with an anti-tau antibody described herein (e.g., a vectorized anti-tau antibody) for a time sufficient to allow specific binding of the anti-tau antibody to tau in the sample, and (b) contacting the sample with a detection reagent, e.g., an antibody, that specifically binds to the anti-tau antibody, such as to the Fc region of the anti-tau antibody, to thereby detect tau bound by the anti-tau antibody.

[1557] Also provided are methods of detecting the presence of tau (e.g., human tau) in a sample, or measuring the amount of tau, comprising contacting a sample (e.g., biological sample such as a tissue sample) with an anti-tau antibody described herein (e.g., a vectorized anti-tau antibody) under conditions that allow for formation of a complex between the antibody and tau, and detecting the formation of a complex. In some embodiments, the method may also include contacting the sample with a control antibody (e.g., an isotype control antibody) in parallel, wherein the difference in complex formation between the anti-tau antibody and sample and control antibody and sample is indicative of the presence of tau in the sample. In some embodiments, the anti-tau antibodies described herein (e.g., vectorized anti-tau antibodies) can be used to purify tau (e.g., the various phospho-tau species recognized by the anti-tau antibodies described herein) via immunoaffinity purification.

[1558] In some embodiments, treatments are informed by diagnostic information generated using anti-tau antibodies (e.g., vectorized anti-tau antibodies). Accordingly, the present disclosure provides methods of treating neurological diseases and/or disorders that include obtaining a sample from a subject, diagnosing one or more neurological diseases and/or disorders using an anti-tau antibody, and administering a treatment selected based on the diagnosis. Such treatments may include treatment with anti-tau antibodies, or an AAV particle comprising a viral genome comprising a nucleotide sequence encoding an anti-tau antibody (e.g., an anti-tau antibody described herein). Anti-tau antibodies or AAV particles administered according to such methods may include any of those described herein.

[1559] In some embodiments, the present disclosure provides methods of detecting and/or quantifying tau proteins in samples through the use of capture and detection antibodies. As used herein, a “capture antibody” is an antibody that binds an analyte in a way that it may be isolated or detected. Capture antibodies may be associated with surfaces or other carriers (e.g., beads). Detection antibodies are antibodies that facilitate observation of the presence or absence of an analyte. According to some methods of detecting and/or quantifying tau proteins, both capture antibodies and detection antibodies bind to tau proteins. Capture and detection antibodies may bind to different epitopes or regions of tau proteins to avoid competition for binding. In some embodiments, detection antibodies may be conjugated with a detectable label for direct detection. In some embodiments, binding of detection antibodies may be assessed using a secondary antibody that binds to a constant domain of the detection antibody or to a detectable label of the detection antibody. Capture, detection, and/or secondary antibodies may be derived from different species. This may prevent secondary antibodies from binding to both capture and detection antibodies.

### V. Kits and Devices

### Kits

[1560] In some embodiments, compounds and composition of the present disclosure may be included in a kit. Such compounds and compositions may include anti-tau antibodies disclosed herein, or an AAV particle comprising a viral genome comprising a nucleotide sequence encoding an anti-tau antibody (e.g., an anti-tau antibody described herein). In a non-limiting example, kits may include reagents for generating anti-tau antibodies, including tau protein antigens. Kits may include additional reagents and/or instructions for use, e.g., for creating or synthesizing anti-tau antibodies. Kits may include one or more buffers. Kits may include additional components, for example, solid supports or substrates for antibody or antigen attachment.

[1561] In some embodiments, the present disclosure includes kits for screening, monitoring, and/or diagnosis of a subject that include one or more anti-tau antibodies, or an AAV particle comprising a viral genome comprising a nucleotide sequence encoding an anti-tau antibody (e.g., an anti-tau antibody described herein). Such kits may be used alone or in combination with one or more other methods of screening, monitoring, and/or diagnosis. Kits may include one or more of a buffer, a biological standard, a secondary antibody, a detection reagent, and a composition for sample pre-treatment (e.g., for antigen retrieval, blocking, etc.).

[1562] Kit components may be packaged. In some embodiments, kit components are packaged in aqueous media or in lyophilized form. Packaging may include one or more vial, test tube, flask, bottle, syringe or other container into which a component may be placed and/or suitably aliquoted. Where there are multiple kit components (labeling reagent and label may be packaged together), kits may include second, third or other additional containers into which additional components may be separately placed.

[1563] When kit components are provided in one and/or more liquid solutions, liquid solutions may be aqueous. Liquid solutions may be provided sterile. Kit components may be provided as dried powder(s). Dried powder components may be provided for reconstitution by kit users, e.g., by addition of suitable solvent. Solvents may also be provided in kits in one or more separate containers. In some embodiments, labeling dyes are provided in dried powder format.

[1564] Kits may include instructions for employing kit components as well other reagents not included in the kit. Instructions may include variations that can be implemented.

### Devices

[1565] Any of the compounds, e.g., an anti-tau antibody or an AAV particle comprising a viral genome comprising a nucleotide sequence encoding an anti-tau antibody (e.g., an anti-tau antibody described herein), and compositions described herein may be combined with, coated onto, or embedded in, or delivered by a device. Devices may include, but are not limited to, implants, stents, bone replacements, artificial joints, valves, pacemakers, or other implantable therapeutic devices.

### VI. Definitions

[1566] At various places in the present specification, substituents of compounds of the present disclosure are disclosed in groups or in ranges. It is specifically intended that the present disclosure include each and every individual sub combination of the members of such groups and ranges.

[1567] AAVParticle: As used herein, an “AAV particle” refers to a particle or a virion comprising an AAV capsid, e.g., an AAV capsid variant, and a polynucleotide, e.g., a viral genome or a vector genome. In some embodiments, the viral genome of the AAV particle comprises at least one payload region and at least one ITR. In some embodiments, an AAV particle of the disclosure is an AAV particle comprising an AAV capsid polypeptide, e.g., a parent capsid sequence with at least one peptide insert. In some embodiments, the AAV particle is capable of delivering a nucleic acid, e.g., a payload region, encoding a payload to cells, typically, mammalian, e.g., human, cells. In some embodiments, an AAV particle of the present disclosure may be produced recombinantly. In some embodiments, an AAV particle may be derived from any serotype, described herein or known in the art, including combinations of serotypes (e.g., “pseudotyped” AAV) or from various genomes (e.g., single stranded or self-complementary). In some embodiments, the AAV particle may be replication defective and/or targeted. In some embodiments, the AAV particle may comprises a peptide present, e.g., inserted into, the capsid to enhance tropism for a desired target tissue. It is to be understood that reference to the AAV particle of the disclosure also includes pharmaceutical compositions thereof, even if not explicitly recited.

[1568] About: As used herein, the term “about” means+/−10% of the recited value.

[1569] Administered in combination: As used herein, the term “administered in combination” or “combined administration” means that two or more agents are administered to a subject at the same time or within an interval such that there may be an overlap of an effect of each agent on the patient. In some embodiments, they are administered within about 60, 30, 15, 10, 5, or 1 minute of one another. In some embodiments, the administrations of the agents are spaced sufficiently closely together such that a combinatorial (e.g., a synergistic) effect is achieved.

[1570] Amelioration: As used herein, the term “amelioration” or “ameliorating” refers to a lessening of severity of at least one indicator of a condition or disease. For example, in the context of neurodegeneration disorder, amelioration includes the reduction of neuron loss.

[1571] Approximately: As used herein, the term “approximately” or “about,” as applied to one or more values of interest, refers to a value that is similar to a stated reference value. In certain embodiments, the term “approximately” or “about” refers to a range of values that fall within 25%, 20%, 19%, 18%, 17%, 16%, 15%, 14%, 13%, 12%, 11%, 10%, 9%, 8%, 7%, 6%, 5%, 4%, 3%, 2%, 1%, or less in either direction (greater than or less than) of the stated reference value unless otherwise stated or otherwise evident from the context (except where such number would exceed 100% of a possible value).

[1572] Associated with: As used herein, the terms “associated with,” “conjugated,” “linked,” “attached,” and “tethered,” when used with respect to two or more entities, means that the entities are physically associated or connected with one another, either directly or via a linker, to form a structure that is sufficiently stable so that the entities remain physically associated, e.g., under working conditions, e.g., under physiological conditions. An “association” need not be through covalent chemical bonding and may include other forms of association or bonding sufficiently stable such that the “associated” entities remain physically associated, e.g., ionic bonding, hydrostatic bonding, hydrophobic bonding, hydrogen bonding, or hybridization-based connectivity.

[1573] Biologically active: As used herein, the phrase “biologically active” refers to a characteristic of any substance that has activity in a biological system and/or organism. For instance, a substance that, when administered to an organism, has a biological effect on that organism, is considered to be biologically active.

[1574] Capsid: As used herein, the term “capsid” refers to the exterior, e.g., a protein shell, of a virus particle, e.g., an AAV particle, that is substantially (e.g., >50%, >60%, >70%, >80%, >90%, >95%, >99%, or 100%) protein. In some embodiments, the capsid is an AAV capsid comprising an AAV capsid protein described herein, e.g., a VP1, VP2, and/or VP3 polypeptide. The AAV capsid protein can be a wild-type AAV capsid protein or a variant, e.g., a structural and/or functional variant from a wild-type or a reference capsid protein, referred to herein as an “AAV capsid variant.” In some embodiments, the AAV capsid variant described herein has the ability to enclose, e.g., encapsulate, a viral genome and/or is capable of entry into a cell, e.g., a mammalian cell. In some embodiments, the AAV capsid variant described herein may have modified tropism compared to that of a wild-type AAV capsid, e.g., the corresponding wild-type capsid.

[1575] Chimeric antigen receptor (CAR): As used herein, the term “chimeric antigen receptor” or “CAR” refers to an artificial chimeric protein comprising at least one antigen specific targeting region (ASTR), a transmembrane domain and an intracellular signaling domain, wherein the antigen specific targeting region comprises a full-length antibody or a fragment thereof. As a non-limiting example, the ASTR of a CAR may be any of the antibodies presented herein or fragments thereof. Any molecule that is capable of binding a target antigen with high affinity can be used in the ASTR of a CAR. The CAR may optionally have an extracellular spacer domain and/or a co-stimulatory domain. A CAR may also be used to generate a cytotoxic cell carrying the CAR.

[1576] Codon optimization: As used herein, the term “codon optimization” refers to a process of changing codons of a given gene in such a manner that the polypeptide sequence encoded by the gene remains the same while the changed codons improve the process of expression of the polypeptide sequence. For example, if the polypeptide is of a human protein sequence and expressed in E. coli, expression will often be improved if codon optimization is performed on the DNA sequence to change the human codons to codons that are more effective for expression in E. coli.

[1577] Comprehensive Positional Evolution (CPE™): As used herein, the term “comprehensive positional evolution” refers to an antibody evolution technology that allows for mapping of the effects of amino acid changes at every position along an antibody variable domain's sequence. This comprehensive mutagenesis technology can be used to enhance one or more antibody properties or characteristics.

[1578] Comprehensive Protein Synthesis (CPS™): As used herein, the term “comprehensive protein synthesis” refers to a combinatorial protein synthesis technology that can be used to optimize antibody properties or characteristics by combining the best properties into a new, high-performance antibody.

[1579] Conserved: As used herein, the term “conserved” refers to nucleotides or amino acid residues of a polynucleotide sequence or polypeptide sequence, respectively, that are those that occur unaltered in the same position of two or more sequences being compared. Nucleotides or amino acids that are relatively conserved are those that are conserved amongst more related sequences than nucleotides or amino acids appearing elsewhere in the sequences.

[1580] In some embodiments, two or more sequences are said to be “completely conserved” if they are 100% identical to one another. In some embodiments, two or more sequences are said to be “highly conserved” if they are at least 70% identical, at least 80% identical, at least 90% identical, or at least 95% identical to one another. In some embodiments, two or more sequences are said to be “highly conserved” if they are about 70% identical, about 80% identical, about 90% identical, about 95%, about 98%, or about 99% identical to one another. In some embodiments, two or more sequences are said to be “conserved” if they are at least 30% identical, at least 40% identical, at least 50% identical, at least 60% identical, at least 70% identical, at least 80% identical, at least 90% identical, or at least 95% identical to one another. In some embodiments, two or more sequences are said to be “conserved” if they are about 30% identical, about 40% identical, about 50% identical, about 60% identical, about 70% identical, about 80% identical, about 90% identical, about 95% identical, about 98% identical, or about 99% identical to one another. Conservation of sequence may apply to the entire length of a polynucleotide or polypeptide or may apply to a portion, region or feature thereof.

[1581] Cytotoxic: As used herein, “cytotoxic” refers to killing or causing injurious, toxic, or deadly effect on a cell (e.g., a mammalian cell (e.g., a human cell)), bacterium, virus, fungus, protozoan, parasite, prion, or a combination thereof.

[1582] Delivery: As used herein, “delivery” refers to the act or manner of providing a compound, substance, entity, moiety, cargo, or payload to a subject or destination.

[1583] Delivery Agent: As used herein, “delivery agent” refers to any agent which facilitates, at least in part, the delivery of one or more substances (including, but not limited to a compounds and/or compositions of the present disclosure, e.g., viral particles or AAV vectors) to targeted cells.

[1584] Encapsulate: As used herein, the term “encapsulate” means to enclose, surround or encase. As an example, a capsid protein, e.g., an AAV capsid variant, often encapsulates a viral genome. In some embodiments, encapsulate within a capsid, e.g., an AAV capsid variant, encompasses 100% coverage by a capsid, as well as less than 100% coverage, e.g., 95%, 90%, 85%, 80%, 70%, 60% or less. For example, gaps or discontinuities may be present in the capsid so long as the viral genome is retained in the capsid, e.g., prior to entry into a cell.

[1585] Effective Amount: As used herein, the term “effective amount” of an agent is that amount sufficient to effect beneficial or desired results, for example, clinical results, and, as such, an “effective amount” depends upon the context in which it is being applied. For example, in the context of administering an agent that treats cancer, an effective amount of an agent is, for example, an amount sufficient to achieve treatment of a therapeutic indication as compared to the response obtained without administration of the agent.

[1586] Epitope: As used herein, an “epitope” refers to a surface or region on one or more entities that is capable of interacting with an antibody or other binding biomolecule. For example, a protein epitope may contain one or more amino acids and/or post-translational modifications (e.g., phosphorylated residues) which interact with an antibody. In some embodiments, an epitope may be a “conformational epitope,” which refers to an epitope involving a specific three-dimensional arrangement of the entity(ies) having or forming the epitope. For example, conformational epitopes of proteins may include combinations of amino acids and/or post-translational modifications from folded, non-linear stretches of amino acid chains.

[1587] EvoMap™: As used herein, an EvoMap™ refers to a map of a polypeptide, wherein detailed informatics are presented about the effects of single amino acid mutations within the length of the polypeptide and their influence on the properties and characteristics of that polypeptide.

[1588] Expression: As used herein, “expression” of a gene, nucleic acid, or protein refers to one or more of the following events: (1) production of an RNA template from a DNA sequence (e.g., by transcription); (2) processing of an RNA transcript (e.g., by splicing, editing, 5′ cap formation, and/or 3′ end processing); (3) translation of an RNA into a polypeptide or protein; and (4) post-translational modification of a polypeptide or protein.

[1589] Formulation: As used herein, a “formulation” refers to a material or mixture prepared according to a formula. Formulations may include a compound (e.g., an antibody) or substance combined with a carrier or excipient.

[1590] Fragment: A “fragment,” as used herein, refers to a portion. For example, fragments of proteins may include polypeptides obtained by digesting full-length protein isolated from cultured cells.

[1591] Homology: As used herein, the term “homology” refers to the overall relatedness between polymeric molecules, e.g. between polynucleotide molecules (e.g. DNA molecules and/or RNA molecules) and/or between polypeptide molecules. In some embodiments, polymeric molecules are considered to be “homologous” to one another if their sequences are at least 25%, 30%, 35%, 40%, 45%, 50%, 55%, 60%, 65%, 70%, 75%, 80%, 85%, 90%, 95%, or 99% identical or similar. The term “homologous” necessarily refers to a comparison between at least two sequences (polynucleotide or polypeptide sequences). In accordance with the disclosure, two polynucleotide sequences are considered to be homologous if the polypeptides they encode are at least about 50%, 60%, 70%, 80%, 90%, 95%, or even 99% for at least one stretch of at least about 20 amino acids. In some embodiments, homologous polynucleotide sequences are characterized by the ability to encode a stretch of at least 4-5 uniquely specified amino acids. For polynucleotide sequences less than 60 nucleotides in length, homology is determined by the ability to encode a stretch of at least 4-5 uniquely specified amino acids. In accordance with the disclosure, two protein sequences are considered to be homologous if the proteins are at least about 50%, 60%, 70%, 80%, or 90% identical for at least one stretch of at least about 20 amino acids.

[1592] Identity: As used herein, the term “identity” refers to the overall relatedness between polymeric molecules, e.g., between polynucleotide molecules (e.g. DNA molecules and/or RNA molecules) and/or between polypeptide molecules. Calculation of the percent identity of two polynucleotide sequences, for example, can be performed by aligning the two sequences for optimal comparison purposes (e.g., gaps can be introduced in one or both of a first and a second nucleic acid sequences for optimal alignment and non-identical sequences can be disregarded for comparison purposes). In certain embodiments, the length of a sequence aligned for comparison purposes is at least 30%, at least 40%, at least 50%, at least 60%, at least 70%, at least 80%, at least 90%, at least 95%, or 100% of the length of the reference sequence. The nucleotides at corresponding nucleotide positions are then compared. When a position in the first sequence is occupied by the same nucleotide as the corresponding position in the second sequence, then the molecules are identical at that position. The percent identity between the two sequences is a function of the number of identical positions shared by the sequences, taking into account the number of gaps, and the length of each gap, which needs to be introduced for optimal alignment of the two sequences. The comparison of sequences and determination of percent identity between two sequences can be accomplished using a mathematical algorithm. For example, the percent identity between two nucleotide sequences can be determined using methods such as those described in Computational Molecular Biology, Lesk, A. M., ed., Oxford University Press, New York, 1988; Biocomputing: Informatics and Genome Projects, Smith, D. W., ed., Academic Press, New York, 1993; Sequence Analysis in Molecular Biology, von Heinje, G., Academic Press, 1987; Computer Analysis of Sequence Data, Part I, Griffin, A. M., and Griffin, H. G., eds., Humana Press, New Jersey, 1994; and Sequence Analysis Primer, Gribskov, M. and Devereux, J., eds., M Stockton Press, New York, 1991; each of which is incorporated herein by reference. For example, the percent identity between two nucleotide sequences can be determined using the algorithm of Meyers and Miller (CABIOS, 1989, 4:11-17), which has been incorporated into the ALIGN program (version 2.0) using a PAM120 weight residue table, a gap length penalty of 12 and a gap penalty of 4. The percent identity between two nucleotide sequences can, alternatively, be determined using the GAP program in the GCG software package using an NWSgapdna.CMP matrix. Methods commonly employed to determine percent identity between sequences include, but are not limited to those disclosed in Carillo, H. and Lipman, D., SIAM J Applied Math., 48:1073 (1988); incorporated herein by reference. Techniques for determining identity are codified in publicly available computer programs. Exemplary computer software to determine homology between two sequences include, but are not limited to, GCG program package, Devereux, J., et al., Nucleic Acids Research, 12(1), 387 (1984)), BLASTP, BLASTN, and FASTA Altschul, S. F. et al., J. Molec. Biol., 215, 403 (1990)).

[1593] Isolated: As used herein, the term “isolated” refers to a substance or entity that has been separated from at least some of the components with which it was associated (whether in nature or in an experimental setting). Isolated substances may have varying levels of purity in reference to the substances from which they have been associated. Isolated substances and/or entities may be separated from at least about 10%, about 20%, about 30%, about 40%, about 50%, about 60%, about 70%, about 80%, about 90%, or more of the other components with which they were initially associated. In some embodiments, isolated agents are more than about 80%, about 85%, about 90%, about 91%, about 92%, about 93%, about 94%, about 95%, about 96%, about 97%, about 98%, about 99%, or more than about 99% pure. As used herein, a substance is “pure” if it is substantially free of other components.

[1594] Substantially isolated: By “substantially isolated” is meant that a substance is substantially separated from the environment in which it was formed or detected. Substantial separation can include compositions containing at least about 50%, at least about 60%, at least about 70%, at least about 80%, at least about 90%, at least about 95%, at least about 97%, or at least about 99% by weight of the compound of the present disclosure, or salt thereof. Methods for isolating compounds and their salts are routine in the art.

[1595] Linker: As used herein “linker” refers to a molecule or group of molecules which connects two molecules. In some embodiments, linkers may be cleavable (e.g., through contact with an enzyme, change in pH, or change in temperature).

[1596] miR binding site or miR binding site series: As used herein, the “miR binding site” or “miR binding site series” includes an RNA sequence on the RNA transcript produced by transcribing the AAV vector genome. The “miR binding site” or the “miR binding site series” also includes the DNA sequence corresponding to the RNA sequence, in that they differ only by the T in DNA and the U in RNA. The reverse complement of such DNA is the coding sequence for the RNA sequence. That is, in some embodiments, in an expression cassette containing a DNA positive strand, the miR binding site sequence is the reverse complement of the miRNA to which it binds.

[1597] Modified: As used herein “modified” refers to a changed state or structure of a molecule. Molecules may be modified in many ways including chemically, structurally, and functionally.

[1598] Naturally occurring: As used herein, “naturally occurring” or “wild-type” means existing in nature without artificial aid, or involvement of the hand of man.

[1599] Non-human vertebrate: As used herein, a “non-human vertebrate” includes all vertebrates except Homo sapiens, including wild and domesticated species. Examples of non-human vertebrates include, but are not limited to, mammals, such as alpaca, banteng, bison, camel, cat, cattle, deer, dog, donkey, gayal, goat, guinea pig, horse, llama, mule, pig, primate, rabbit, reindeer, sheep, water buffalo, and yak.

[1600] Off-target: As used herein, “off-target” refers to unintended activity or binding to an entity other than an expected target.

[1601] Operably linked: As used herein, the phrase “operably linked” refers to a functional connection between two or more molecules, constructs, transcripts, entities, moieties or the like.

[1602] Payload: As used herein, “payload” or “payload region” refers to one or more polynucleotides or polynucleotide regions encoded by or within a viral genome or an expression product of such polynucleotide or polynucleotide region, e.g., a transgene, a polynucleotide encoding a polypeptide.

[1603] Payload construct: As used herein, “payload construct” is one or more polynucleotide regions encoding or comprising a payload that is flanked on one or both sides by an inverted terminal repeat (ITR) sequence. The payload construct is a template that is replicated in a viral production cell to produce a viral genome.

[1604] Payload construct vector: As used herein, “payload construct vector” is a vector encoding or comprising a payload construct, and regulatory regions for replication and expression in bacterial cells. The payload construct vector may also comprise a component for viral expression in a viral replication cell.

[1605] Patient: As used herein, “patient” refers to a subject who may seek or be in need of treatment, requires treatment, is receiving treatment, will receive treatment, or a subject who is under care by a trained professional for a particular disease or condition.

[1606] Peptide: As used herein, “peptide” is less than or equal to 50 amino acids long, e.g., about 5, 10, 15, 20, 25, 30, 35, 40, 45, or 50 amino acids long.

[1607] Pharmaceutically acceptable: The phrase “pharmaceutically acceptable” is employed herein to refer to those compounds, materials, compositions, and/or dosage forms which are, within the scope of sound medical judgment, suitable for use in contact with the tissues of human beings and animals without excessive toxicity, irritation, allergic response, or other problem or complication, commensurate with a reasonable benefit/risk ratio.

[1608] Pharmacokinetic: As used herein, “pharmacokinetic” refers to any one or more properties of a molecule or compound as it relates to the determination of the fate of substances administered to a living organism. Pharmacokinetics is divided into several areas including the extent and rate of absorption, distribution, metabolism and excretion. This is commonly referred to as ADME where: (A) Absorption is the process of a substance entering the blood circulation; (D) Distribution is the dispersion or dissemination of substances throughout the fluids and tissues of the body; (M) Metabolism (or Biotransformation) is the irreversible transformation of parent compounds into daughter metabolites; and (E) Excretion (or Elimination) refers to the elimination of the substances from the body. In rare cases, some drugs irreversibly accumulate in body tissue.

[1609] Preventing: As used herein, the term “preventing” refers to partially or completely delaying onset of an infection, disease, disorder and/or condition; partially or completely delaying onset of one or more symptoms, features, or clinical manifestations of a particular infection, disease, disorder, and/or condition; partially or completely delaying onset of one or more symptoms, features, or manifestations of a particular infection, disease, disorder, and/or condition; partially or completely delaying progression from an infection, a particular disease, disorder and/or condition; and/or decreasing the risk of developing pathology associated with the infection, the disease, disorder, and/or condition.

[1610] Prophylactic: As used herein, “prophylactic” refers to a therapeutic or course of action used to prevent the spread of disease.

[1611] Prophylaxis: As used herein, a “prophylaxis” refers to a measure taken to maintain health and prevent the spread of disease.

[1612] Purified: As used herein, “purify,” “purified,” “purification” means to make substantially pure or clear from unwanted components, material defilement, admixture or imperfection. “Purified” refers to the state of being pure. “Purification” refers to the process of making pure.

[1613] Region: As used herein, the term “region” refers to a zone or general area. In some embodiments, when referring to a polypeptide or protein, a region may include a linear sequence of amino acids along the polypeptide or protein or may include a three-dimensional area, an epitope, or a cluster of epitopes. When referring to a polynucleotide, a region may include a linear sequence of nucleic acids along the polynucleotide or may include a three-dimensional area, secondary structure, or tertiary structure. Regions may include terminal regions. As used herein, the term “terminal region” refers to a region located at the end or “terminus” of a given entity. When referring to polypeptides, terminal regions may include N- and/or C-termini. N-terminus refers to the end of a polypeptide with a free amino acid amino group. C-terminus refers to the end of a polypeptide with a free amino acid carboxyl group. N- and/or C-terminal regions may refer to a single terminal functional group, single amino acid, or multiple amino acids located at either terminus. When referring to polynucleotides, terminal regions may include 5′ and 3′ termini. The 5′ terminus refers to the end of a polynucleotide that includes a free nucleic acid phosphate group. The 3′ terminus refers to the end of a polynucleotide that includes a free nucleic acid hydroxyl group. Polynucleotide terminal regions may refer to a single terminal functional group, single nucleotide, or multiple nucleotides located at a terminus.

[1614] RNA and DNA: As used herein, the term “RNA” or “RNA molecule” or “ribonucleic acid molecule” refers to a polymer of ribonucleotides; the term “DNA” or “DNA molecule” or “deoxyribonucleic acid molecule” refers to a polymer of deoxyribonucleotides. DNA and RNA can be synthesized naturally, e.g., by DNA replication and transcription of DNA, respectively; or be chemically synthesized. RNA and DNA can be single-stranded (i.e., ssRNA or ssDNA, respectively) or multi-stranded (e.g., double stranded, i.e., dsRNA and dsDNA, respectively). The term “messenger RNA” or “mRNA,” as used herein, refers to a single stranded RNA that encodes an amino acid sequence of one or more polypeptide chains.

[1615] Sample: As used herein, the term “sample” refers to a portion or subset of larger entity. A sample from a biological organism or material is referred to herein as a “biological sample” and may include, but is not limited to, tissues, cells, and body fluids (e.g., blood, mucus, lymphatic fluid, synovial fluid, cerebrospinal fluid, saliva, amniotic fluid, amniotic cord blood, urine, vaginal fluid, and semen). Samples may further include a homogenate, lysate or extract prepared from a whole organism or a subset of its tissues, cells or component parts, or a fraction or portion thereof, including but not limited to, for example, plasma, serum, spinal fluid, lymph fluid, the external sections of the skin, respiratory, intestinal, and genitourinary tracts, tears, saliva, milk, blood cells, tumors, and organs. Samples may further include a medium, such as a nutrient broth or gel, which may contain cellular components, such as proteins or nucleic acid molecules.

[1616] Serotype: As used herein, the term “serotype” refers to distinct variations in a capsid of an AAV based on surface antigens which allow epidemiologic classifications of the AAVs at the sub-species level.

[1617] Signal Sequences: As used herein, the phrase “signal sequences” refers to a sequence which can direct the transport or localization of a protein.

[1618] Single unit dose: As used herein, a “single unit dose” is a dose of any therapeutic administered in one dose/at one time/single route/single point of contact, i.e., single administration event. In some embodiments, a single unit dose is provided as a discrete dosage form (e.g., a tablet, capsule, patch, loaded syringe, vial, etc.).

[1619] Spacer: As used herein, a “spacer” is generally any selected nucleic acid sequence of, e.g., 1, 2, 3, 4, 5, 6, 7, 8, 9, or 10 nucleotides in length, which is located between two or more consecutive miR binding site sequences.

[1620] Split dose: As used herein, a “split dose” is the division of single unit dose or total daily dose into two or more doses.

[1621] Stable: As used herein “stable” refers to a state of an entity that is sufficiently robust to survive a certain degree of perturbation. For example, a stable compound or protein may remain intact during isolation to a useful degree of purity from a reaction mixture.

[1622] Subject: As used herein, the term “subject” refers to any organism to which a compound, composition, method, kit, or device according to the present disclosure may be administered or applied, e.g., for experimental, diagnostic, prophylactic, and/or therapeutic purposes. Subjects can include animals (e.g., mammals such as mice, rats, rabbits, non-human primates, and humans) and plants. A subject receiving, requiring, eligible for, or seeking medical treatment is referred to herein as a “patient.”

[1623] Substantially: As used herein, the term “substantially” refers to the qualitative condition of exhibiting total or near-total extent or degree of a characteristic or property of interest. One of ordinary skill in the biological arts will understand that biological and chemical phenomena rarely, if ever, go to completion and/or proceed to completeness or achieve or avoid an absolute result. The term “substantially” is therefore used herein to capture the potential lack of completeness inherent in many biological and chemical phenomena.

[1624] Suffering from: An individual who is “suffering from” a disease, disorder, and/or condition has been diagnosed with or displays one or more symptoms of a disease, disorder, and/or condition.

[1625] Susceptible to: An individual who is “susceptible to” a disease, disorder, and/or condition has not been diagnosed with and/or may not exhibit symptoms of the disease, disorder, and/or condition but harbors a propensity to develop a disease or its symptoms. In some embodiments, an individual who is susceptible to a disease, disorder, and/or condition (for example, neurodegenerative disease) may be characterized by one or more of the following: (1) a genetic mutation associated with development of the disease, disorder, and/or condition; (2) a genetic polymorphism associated with development of the disease, disorder, and/or condition; (3) increased and/or decreased expression and/or activity or disfunction of a protein and/or nucleic acid associated with the disease, disorder, and/or condition; (4) habits and/or lifestyles associated with development of the disease, disorder, and/or condition; (5) a family history of the disease, disorder, and/or condition; and (6) exposure to and/or infection with a microbe associated with development of the disease, disorder, and/or condition. In some embodiments, an individual who is susceptible to a disease, disorder, and/or condition will develop the disease, disorder, and/or condition. In some embodiments, an individual who is susceptible to a disease, disorder, and/or condition will not develop the disease, disorder, and/or condition.

[1626] Therapeutic Agent: The term “therapeutic agent” refers to any agent that, when administered to a subject, has a therapeutic, diagnostic, and/or prophylactic effect and/or elicits a desired biological and/or pharmacological effect. Therapeutic agents capable of producing a biological effect in living organisms are referred to herein as “drugs.”

[1627] Therapeutically effective amount: As used herein, the term “therapeutically effective amount” means an amount of an agent (e.g., antibody or other therapeutic agent) to be delivered to a subject suffering from or susceptible to an infection, disease, disorder, and/or condition, that when delivered or administered in that amount is sufficient to treat, improve symptoms of, diagnose, prevent, and/or delay the onset of the infection, disease, disorder, and/or condition. In some embodiments, a therapeutically effective amount is provided in a single dose. In some embodiments, a therapeutically effective amount is administered in a dosage regimen that includes a plurality of doses. Those skilled in the art will appreciate that in some embodiments, a unit dosage form may be considered to include a therapeutically effective amount of a particular agent or entity if it includes an amount that is effective when administered as part of such a dosage regimen.

[1628] Therapeutically effective outcome: As used herein, the term “therapeutically effective outcome” means an outcome that is sufficient in a subject suffering from or susceptible to an infection, disease, disorder, and/or condition, to treat, improve symptoms of, diagnose, prevent, and/or delay the onset of the infection, disease, disorder, and/or condition.

[1629] Treating: As used herein, the term “treating” refers to partially or completely alleviating, ameliorating, improving, relieving, delaying onset of, inhibiting progression of, reducing severity of, and/or reducing incidence of one or more symptoms or features of a particular infection, disease, disorder, and/or condition. For example, “treating” neurodegenerative disease in a subject may refer to inhibiting neurodegeneration; promoting the health of neuronal cells; reversing, preventing, or reducing the formation of plaques or tangles in the brain; and/or reversing, preventing, or reducing memory loss or loss of other neurological functions or activities of the subject. Treatment may be administered to a subject who does not exhibit signs of a disease, disorder, and/or condition and/or to a subject who exhibits only early signs of a disease, disorder, and/or condition for the purpose of decreasing the risk of developing pathology associated with the disease, disorder, and/or condition.

[1630] Unmodified: As used herein, “unmodified” refers to any substance, compound or molecule prior to being changed in any way. Unmodified may refer to the wild type or native form of a biomolecule. Molecules may undergo a series of modifications whereby each modified molecule may serve as the “unmodified” starting molecule for a subsequent modification.

[1631] Vector: As used herein, a “vector” is any molecule or moiety which transports, transduces or otherwise acts as a carrier of a heterologous molecule. Vectors of the present disclosure may be produced recombinantly.

[1632] Viral genome: As used herein, a “viral genome” or “vector genome” is a polynucleotide comprising at least one inverted terminal repeat (ITR) and at least one encoded payload. A viral genome encodes at least one copy of the payload.

### VII. Equivalents and Scope

[1633] Those skilled in the art will recognize, or be able to ascertain using no more than routine experimentation, many equivalents to the specific embodiments in accordance with the invention described herein. The scope of the present invention is not intended to be limited to the above Description, but rather is as set forth in the appended claims.

[1634] In the claims, articles such as “a,” “an,” and “the” may mean one or more than one unless indicated to the contrary or otherwise evident from the context. Claims or descriptions that include “or” between one or more members of a group are considered satisfied if one, more than one, or all of the group members are present in, employed in, or otherwise relevant to a given product or process unless indicated to the contrary or otherwise evident from the context. The invention includes embodiments in which exactly one member of the group is present in, employed in, or otherwise relevant to a given product or process. The invention includes embodiments in which more than one, or the entire group members are present in, employed in, or otherwise relevant to a given product or process.

[1635] It is also noted that the term “comprising” is intended to be open and permits but does not require the inclusion of additional elements or steps. When the term “comprising” is used herein, the term “consisting of” is thus also encompassed and disclosed.

[1636] Where ranges are given, endpoints are included. Furthermore, it is to be understood that unless otherwise indicated or otherwise evident from the context and understanding of one of ordinary skill in the art, values that are expressed as ranges can assume any specific value or subrange within the stated ranges in different embodiments of the invention, to the tenth of the unit of the lower limit of the range, unless the context clearly dictates otherwise.

[1637] All cited sources, for example, references, publications, databases, database entries, and art cited herein, are incorporated into this application by reference, even if not expressly stated in the citation.

[1638] Section and table headings are not intended to be limiting.

### EXAMPLES

### Example 1. Antigen Preparation

[1639] Antigen preparation was carried out to support generation and characterization of anti-human tau antibodies. Enriched paired helical filament (ePHF; sarkosyl insoluble tau) including human microtubule-associated protein tau, isoform 2 (SEQ ID NO: 1404) was prepared along with several tau protein antigens with different phosphorylated residues corresponding to pathological tau. Related sequences are presented in Table 6. Phosphorylated residues are underlined in the Table.

TABLE 6
Tau protein antigens

| | | SEQ |
|---|---|---|
| | | ID |
| Antigen | Sequence | NO |
| human | MAEPRQEFEVMEDHAGTYGLGDRKDQ | 1404 |
| microtubule- | GGYTMHQDQEGDTDAGLKESPLQTPT | |
| associated | EDGSEEPGSETSDAKSTPTAEDVTAP | |
| protein tau, | LVDEGAPGKQAAAQPHTEIPEGTTAE | |
| isoform 2 | EAGIGDTPSLEDEAAGHVTQARMVSK | |
| | SKDGTGSDDKKAKGADGKTKIATPRG | |
| | AAPPGQKGQANATRIPAKTPPAPKTP | |
| | PSSGEPPKSGDRSGYSSPGSPGTPGS | |
| | RSRTPSLPTPPTREPKKVAVVRTPPK | |
| | SPSSAKSRLQTAPVPMPDLKNVKSKI | |
| | GSTENLKHQPGGGKVQIINKKLDLSN | |
| | VQSKCGSKDNIKHVPGGGSVQIVYKP | |
| | VDLSKVTSKCGSLGNIHHKPGGGQVE | |
| | VKSEKLDFKDRVQSKIGSLDNITHVP | |
| | GGGNKKIETHKLTFRENAKAKTDHGA | |
| | EIVYKSPVVSGDTSPRHLSNVSSTGS | |
| | IDMVDSPQLATLADEVSASLAKQGL | |
| PT3 epitope | TPGSRSRTPSLPTPPTREPK | 1405 |
| peptide | | |
| (pT212/ | | |
| pT217) | | |
| Peptide 5 | GTPGSRSRTPSLPTPPTRE | 1406 |
| (pT212/ | | |
| pS214/ | | |
| pT217) | | |
| Peptide 12 | RENAKAKTDHGAEIVYKSPVVSGDT | 1407 |
| (pS396/ | SPRHLSNVSSTG | |
| pS404/ | | |
| pS409) | | |
| Peptide 1 | PTREPKKV | 1408 |
| (AT120 | | |
| epitope) | | |

[1640] Tau protein antigens were conjugated with keyhole limpet hemocyanin (KLH) for immunization. For ePHF antigen preparation, ePHF was isolated from fractions of AD or non-AD frontal cortical tissue. Cortical tissue fractions were prepared according to methods described by Greenberg and Davies (1990) with minor modification (Liu et al., J Neuroscience, 2016, the contents of which are herein incorporated by reference in their entirety). Briefly, brain tissue was homogenized with cold homogenization buffer (10 mM Tris/1 mM EDTA/0.8 M NaCl/10% sucrose, pH 7.4) with protease inhibitor (Roche Molecular Systems, Inc., Branchburg, NJ) and phosphatase inhibitors cocktail (ThermoFisher, Waltham, MA, catalog #78437) or 1 mM NaF/1 mM Na₃VO₄ in a Teflon glass homogenizer. Brain homogenate was then centrifuged at 27,000×g for 30 min at 4° C. The resulting supernatant was subjected to extraction with 1% (w/v)N-lauroylsarcosine in the presence of 1% (v/v) 2-mercaptoethanol at 37° C. for 2.5 h followed by centrifugation at 108,000×g for 30 min at room temperature. The pellet recovered from this centrifugation was quickly rinsed one time with 0.5 mL of PBS/tube. The rinsed PBS was discarded. Another 0.5 mL of PBS was added to each tube to dissolve PHF. PHF from 6 tubes were pooled and the pooled PHF solution was sonicated. The resulting solution was concentrated to ˜5× and further sonicated. PHF samples were then analyzed by HT7 western for qualitative and PT3 ELISA quantitative assessment. PHF samples were then stored at −80° C.

### Example 2. Immunization

[1641] Transgenic mice developed to express antibodies with human variable domains were used for immunization with ePHF (prepared as described in Example 1). Sera from immunized mice were screened by enzyme-linked immunosorbent assay (ELISA) for the presence of antibodies binding to tau protein antigens. Immunized mice with sera testing positive for antigen-specific antibodies were used to prepare hybridoma cells. Supernatants from hybridoma cell culture medium were screened by direct ELISA to identify cells producing antigen-specific antibodies. Hybridoma clones producing antibodies with positive antigen binding were selected for subcloning and antibody sequence analysis.

[1642] Variable domain amino acid sequences for selected clones included those presented in Table 1, with each ID #corresponding to an antibody expressed by a selected hybridoma clone. Complementarity determining region (CDR) analysis was carried out to identify heavy chain CDRH1, CDRH2, and CDRH3 sequences and light chain CDRL1, CDRL2, and CDRL3 sequences. CDR amino acid sequences identified include those presented in Table 1.

### Example 3. Tau Binding

[1643] A set of recombinant human IgG1 antibodies were prepared with clone-specific variable domain pairs selected from those presented in Table 1 and human IgG1 constant domains. These candidate antibodies were analyzed for binding to ePHF and specificity for ePHF over wild type tau by direct ELISA.

[1644] For direct ePHF and wildtype tau ELISA, plates were first coated with ePHF or wild type tau. Antigen solutions were prepared in PBS and 50 μL were pipetted into each well. Plates were covered and incubated for one hour at 37° C. or overnight at 4° C. Plates were then washed and blocked by addition of 150 μl of blocking buffer to each well and incubated one hour at room temperature. Plates were then washed before addition of serially diluted candidate antibody samples prepared in blocking buffer. Detection of candidate antibody binding was carried out by washing plates and adding a solution of enzyme-labeled secondary antibody in blocking buffer to each well. Secondary antibody binding was detected by addition of substrate and spectrophotometric analysis of resulting reaction product. Half maximal effective concentration (EC50) for antibody binding to ePHF and wild type tau are presented in Table 7.

TABLE 7
ELISA results

| | ePHF EC50 | Wild type Tau |
|---|---|---|
| ID# | (nM) | EC50 (nM) |
| VY001 | 0.02 | No binding |
| VY002 | 0.03 | No binding |
| VY003 | 0.06 | No binding |
| VY004 | 0.07 | No binding |
| VY005 | 0.07 | No binding |
| VY006 | 0.11 | No binding |
| VY007 | 0.18 | No binding |
| VY008 | 0.27 | No binding |
| VY009 | 1.74 | No binding |
| VY010 | 8.99 | No binding |
| VY011 | 0.03 | No binding |
| VY012 | 0.04 | 0.01 |
| VY013 | 0.06 | 0.98 |
| VY014 | 6.23 | 0.04 |
| VY016 | No binding | No binding |
| VY017 | No binding | No binding |
| VY018 | No binding | No binding |
| VY019 | No binding | No binding |
| VY020 | No binding | No binding |

[1645] Results of a follow up analysis of antibodies VY006, VY007, VY001, VY011, VY004, and VY018 for selectivity for iPHF and ePHF over wild-type tau are shown in Table 7A. Overall, the antibodies had a greater than 30-fold selectivity for iPHF over wild-type tau, with VY006, VY007, VY011, and VY004 having a greater than 100-fold selectivity for iPHF over wild-type tau. With regard to the selectivity for ePHF over wild-type tau, the anti-tau antibodies had a greater than 20-fold selectivity for ePHF over wild-type tau, with VY001 and VY011 having a greater than 130-fold selectivity for ePHF over wild-type tau. Further, these antibodies demonstrated low polyspecificity (using BVP ELISA) and good solution and colloidal stability at 10 mg/mL.

TABLE 7A
Selectivity results

| Selectivity | Criteria | VY006 | VY007 | VY001 | VY011 | VY004 | VY018 |
|---|---|---|---|---|---|---|---|
| iPHF:WT | ≥50 fold | >145X | >109X | >30X | >108X | >382X | >73X |
| ePHF:WT | ≥50 fold | >40X | >23X | >181X | >137X | >59X | |

### Example 4. Epitope Affinity Analysis

[1646] Anti-human tau antibodies were assessed for affinity for iPHF by Octet (ForteBio, Menlo Park, CA) analysis. A set of recombinant human IgG1 antibodies were prepared with clone-specific variable domain pairs selected from those presented in Table 1 and human IgG1 constant domains. Candidate antibodies were immobilized on biosensor tips (ForteBio) in kinetic buffer (ForteBio). Biosensor tips were then washed before introduction of a solution of iPHF in kinetic buffer for analysis of association and dissociation with candidate antibodies. Affinity measurements (K_{D}) were obtained using Data Analysis HT version 11.1 and corrected for background and high-frequency noise. Results are presented in Table 8.

TABLE 8
Affinity analysis results

| | iPHF K_{D} | | iPHF K_{D} |
|---|---|---|---|
| ID# | (nM) | ID# | (nM) |
| VY007 | 0.6 | VY013 | 2.9 |
| VY005 | 1.0 | VY018 | 3.0 |
| VY002 | 1.0 | VY004 | 3.7 |
| VY009 | 1.1 | VY017 | 3.7 |
| VY006 | 1.5 | VY003 | 4.6 |
| VY010 | 1.5 | VY012 | 5.1 |
| VY011 | 2.0 | VY014 | 5.3 |
| VY008 | 2.3 | VY001 | 7.7 |
| VY020 | 2.6 | | |

[1647] The antibodies shown in Table 8 all demonstrated K_{D} values less than 10 nM, with antibodies VY002, VY005, and VY007 demonstrating K_{D} values less than or equal to 1 nM. K_{D} values of VY007, VY004, VY006, VY011, VY018, and VY001 for wild-type tau by Octet were all >218 nM.

[1648] Antibodies VY001, VY004, VY006, VY007, and VY0I1 were also assessed for binding to iPHF tau by surface plasmon resonance on a Biacore 8K instrument. Results are presented in Table 8A.

TABLE 8A
SPR affinity results

| | K_{D} |
|---|---|
| Antibody | (pM) |
| mPHF1 | 5.2 |
| (control) | |
| VY007 | 596 |
| VY004 | 11650 |
| VY006 | 356 |
| VY011 | 238 |
| VY001 | 293 |

### Example 5. Epitope Binning by Peptide Antigen

[1649] Anti-human tau antibodies were subjected to PHF tau epitope binning analysis by sandwich ELISA. A set of recombinant human IgG1 antibodies were prepared with clone-specific variable domain pairs selected from those presented in Table 1 and human IgG1 constant domains. Anti-tau antibodies AT120 (directed to peptide 1), PT3 (directed to peptide 5), and C10.2 (directed to peptide 12) were used as capture antibodies in the assay. Capture antibodies were diluted in PBS at a concentration of 1 μg/ml and 50 μl of the solution was used to coat each assay plate well. Plates were covered and incubated overnight at 4° C. Plates were then washed and blocked by addition of 150 μl of blocking buffer to each well and incubated one hour at room temperature. Plates were again washed before coating with ePHF or wild type tau in blocking buffer followed by incubation for 1 hour at room temperature. Plates were then washed before addition of serially diluted candidate antibody samples prepared in blocking buffer. Detection of candidate antibody binding was carried out by washing plates and adding a solution of enzyme-labeled secondary antibody in blocking buffer to each well. Secondary antibody binding was detected by addition of substrate and spectrophotometric analysis of resulting reaction product. Epitope “bins” were determined for each candidate antibody tested based on observed competition (epitope blocking) by each anti-tau capture antibody tested. Results are shown in Table 9.

TABLE 9
Epitope binning results

| ID# | Epitope bin |
|---|---|
| VY017 | AT120 |
| VY013 | C10.2 |
| VY004 | PT3 |
| VY005 | PT3 |
| VY014 | C10.2 |
| VY002 | PT3 |
| VY008 | PT3 |

[1650] Multiple antibodies competed for epitope binding with PT3, with one antibody competing for AT120, and two antibodies competing for epitope binding with C10.2.

[1651] Additional competition assays were performed to further characterize the binding specificity of VY014. Specifically, the binding of VY014 to a Tau(pS404) peptide with only S404 phosphorylated (DHGAEIVYKSPVVSGDTpSPRHLSNVSSTG; SEQ ID NO: 1411) was tested. As shown in FIG. 1A, competitive ELISA using peptide-12 (bound by C10.2/PHF1) from Table 6 (SEQ ID NO: 1407) showed that the Tau(pS404) peptide competitively inhibited the binding of VY014 to peptide-12. While PHF-1 showed binding to the C-terminus of tau (peptide 12) (FIG. 1A), it did not bind to the Tau(pS404) peptide (FIG. 1B). Finally, the AC04 peptide (recognized by antibody PT3 (FIG. 1C) and corresponding to the dual phosphorylated peptide: CSRpTPSLPpTPPTREPK; SEQ ID NO: 1412) did not inhibit VY014 binding to TauS404 (FIG. 1B). These results suggest that VY014 binds to tau phosphorylated at S404 and exhibits a distinct binding pattern to phosphorylated tau species compared to PHF-1.

### Example 6. Epitope Binning of Anti-Human Tau Antibodies by PepScan Overlapping Phosphorylated Peptide Library

[1652] Epitope binning of 15 additional anti-Tau antibodies (i.e., VY003, VY007, VY004, VY006, VY011, VY012, VY009, VY018, VY001, VY019, VY020, VY005, VY002, VY008, and VY013) was performed using a PepScan overlapping phospho-peptide library strategy.

[1653] Briefly, the PepScan library used included 212 phosphorylated overlapping 18-mer peptides, with each fragment containing at least one phosphorylated site (with the exception of 5 fragments). Tau has 45 serines, 35 threonines, and 5 tyrosines, for a total of 85 possible sites.

[1654] In a control run, PT3, PHF1, and C10.2 antibodies were tested for binding to the PepScan library and found to bind to their expected epitopes. Specifically, PT3 bound to amino acids 201-228, PHF1 to amino acids 13-34 and 377-408, and C10.2 to amino acids 39-56, 205-222, and 383-402.

[1655] Table 10 summarizes the epitopes recognized by the tested antibodies using the PepScan library.

TABLE 10
Epitope mapping

| Antibody | Peptide epitopes (amino acid residues) |
|---|---|
| PT3 | 201-228 |
| PHF1 | 13-34; 377-408 |
| C10.2 | 39-56, 205-222, 383-402 |
| MC1 | 1-22 |
| IPN002 | 2-24 |
| AT8 | 187-218 |
| AT180 | 215-238 |
| VY003 | 35-62, 53-76, 187-218 |
| VY007 | 187-218 |
| VY006 | 187-218 |
| VY004 | 33-64; 53-82, 159-178, 165-182, 197-214, 201-226, 229-246 |
| VY011 | 183-201; 187-212 |
| VY012 | 5-34 |
| VY009 | 217-242 |
| VY018 | 217-242 |
| VY001 | 187-218 |
| VY019 | 217-242 |
| VY020 | 187-218 |
| VY005 | 33-64, 53-82, 159-178, 165-188, 191-230 |
| VY002 | 35-62, 107-124, 203-220 |
| VY008 | 35-64, 53-82, 159-188, 197-214, 201-224 |
| VY013 | 53-78, 329-348, 381-408 |

*amino acid residues are in relation to human tau having the sequence of SEQ ID NO: 1404 from Table 10.

[1656] Similar to MCI and IPN002, VY012 exhibited strong binding to the N-terminal region of Tau.

[1657] VY003, VY007, VY006, VY011, VY001, and VY020 exhibited binding to a peptide region similar to the AT8 antibody. However, competitive ELISA using the phospho-peptide spanning amino acids 193-210 (DRpSGYpSpSPGpSPGpTPGpSRpS; SEQ ID NO: 1413) did not demonstrate competition between AT8 and VY003, VY007, VY006, and VY001 (FIG. 2), suggesting that these antibodies may have a different binding specificity to the 193-210 region compared to AT8.

[1658] VY009 and VY018 exhibited binding to a peptide region containing pT231 (Tau217-242).

[1659] VY004, VY005, and VY008 showed strong binding to the proline-rich domain, similar to PT3 (Tau201-228), while VY002 showed very weak binding to PepScan overlapping phosphorylated peptides (Tau203-220). VY004, VY005, VY002, and VY008 also showed strong binding to other regions of tau, especially the N-terminal region (Tau33-64 and Tau53-82).

[1660] VY013 showed strong binding to the C-terminal region of tau (Tau381-408), as well as the N-terminal region (Tau53-78).

### Example 7. Fine Epitope Mapping of AT8 Bin Antibodies

[1661] This Example describes the further characterization of the binding specificity of antibodies tentatively categorized as belonging to the AT8 bin (i.e., VY003, VY007, VY006, VY011, VY001, and VY020).

[1662] As an initial experiment, the ability of the antibodies to bind to the AT8 peptide (amino acids 195-215 of tau) was tested by bio-layer interferometry (BLI; Octet assay). Briefly, phospho-peptides were immobilized on streptavidin biosensor tips and the binding ability of each antibody was assessed using an eight-point concentration gradient.

[1663] As shown in Table 11, VY003, VY007, VY006, VY011, and VY001 showed strong binding to the AT8 peptide, whereas VY020 showed no binding to the peptide.

TABLE 11
Affinity of AT8 bin antibodies for AT8 peptide by BLI

| Antibody | KD (pM) |
|---|---|
| AT8 (positive control) | 309 |
| hIgG1 isotype control | no binding |
| VY003 | 12.4 |
| VY007 | 18.2 |
| VY006 | 3.82 |
| VY011 | 8.9 |
| VY001 | 4.35 |
| VY020 | no binding |

[1664] To further assess the binding characteristics of VY003, VY007, VY006, VY011, and VY001, the ability of these antibodies to bind to different phosphorylated species of the AT8 peptide were tested by one point ELISA using a high resolution sub-phospho-peptide library.

[1665] Briefly, peptides were generated that showed all possible combinations of phosphorylation patterns within known epitopes containing multiple possible phosphorylation sites. One-point ELISA was used to determine differential binding based on the individual phosphorylation patterns of each peptide. OD values (450 nm) were collected (as shown in Table 13), where a stronger positive signal is shown as a higher OD value, which is indicative of increased binding.

[1666] Table 12 lists the Tau191-214 phospho-peptides used in the binding assay, and Table 13 summarizes the specific binding patterns of the antibodies to the phospho-peptides.

TABLE 12
Tau191-214 phospho-peptides used in
binding assay

| SEQ | Descrip- | |
|---|---|---|
| ID | tion | Sequence |
| 1414 | pS199 | SGDRSGYS(pS)PGSPGTPGSRSRTPS |
| 1415 | pS202 | SGDRSGYSSPG(pS)PGTPGSRSRTPS |
| 1416 | pT205 | SGDRSGYSSPGSPG(pT)PGSRSRTPS |
| 1417 | pS199- | SGDRSGYS(pS)PG(pS)PG(pT) |
| | pS202- | PGSRSRTPS |
| | pT205 | |
| 1418 | pS199- | SGDRSGYS(pS)PG(pS)PGTPGSRSRTPS |
| | pS202 | |
| 1419 | pS202- | SGDRSGYSSPG(pS)PG(pT)PGSRSRTPS |
| | pT205 | |
| 1420 | pS199- | SGDRSGYS(pS)PGSPG(pT)PGSRSRTPS |
| | pT205 | |

TABLE 13
Binding assay for AT8 bin antibodies (OD values*)

| | | | | | | | | | hIgG1 |
|---|---|---|---|---|---|---|---|---|---|
| SCBio-4PEG-Peptide | | | | | | AT8 | pS199 | pS202 | isotype |
| (Tau191-214) | VY003 | VY007 | VY006 | VY011 | VY001 | Mab | Rab | Rab | cont |
| pS199-old | 0.062 | 0.057 | 0.063 | 0.544 | 0.059 | 0.056 | 3.168 | | 0.060 |
| pS199 | 0.065 | 0.057 | 0.054 | 0.103 | 0.059 | 0.056 | 3.207 | | 0.058 |
| pS202 | 0.065 | 1.142 | 0.345 | 0.060 | 2.996 | 0.058 | | 3.203 | 0.055 |
| pT205 | 0.060 | 2.023 | 0.365 | 0.060 | 3.117 | 0.065 | | 0.208 | 0.054 |
| pS199-pS202-pT205 | 3.083 | 3.082 | 3.124 | 1.691 | 3.152 | 3.069 | | 1.085 | 0.245 |
| pS199-pS202 | 0.082 | 0.544 | 0.435 | 1.222 | 1.906 | 2.389 | | 3.203 | 0.062 |
| pS202-pT205 | 3.064 | 3.063 | 3.087 | 0.402 | 3.149 | 2.940 | | 0.740 | 0.249 |
| pS199-pT205 | 0.119 | 3.134 | 3.124 | 0.518 | 3.163 | 0.139 | 3.162 | | 0.090 |

*values are readings at OD450 nm

[1667] As shown in Table 13, many of the antibodies showed a distinct binding pattern compared to AT8 for Tau191-214 phospho-peptide species. AT8 did not bind to any of the singly phosphorylated peptides, exhibited binding to all doubly phosphorylated peptides, albeit weakly to the pS 199/pT205 peptide, and bound strongly to the triple phosphorylated peptide (pS199/pS202/pT205).

[1668] VY003, VY007, VY006, VY0111, and VY001 all exhibited binding to the triple phosphorylated peptide (pS 199/pS202/pT205). VY003 exhibited binding when the peptide was doubly phosphorylated at pS202/pT205. VY007 exhibited binding to the peptide when S202 and T205 were singly phosphorylated, and to all doubly phosphorylated peptides, although binding was weaker for the peptide doubly phosphorylated at pS199/pS202 compared to the other two doubly phosphorylated peptides (pS202/pT205 and pS 199/pT205). VY006 exhibited binding to the peptide when S202 and T205 were singly phosphorylated; however, no binding was observed with when only pS 199 was phosphorylated, and strongest binding was observed when the peptide was doubly phosphorylated at pS202/pT205 and pS199/pT205. This suggests that VY006 likely binds strongly to pT205 and an additional epitope, such as pS 199 and/or pS202. Both VY007 and VY006 showed strongest binding when T205 and at least one other site on the peptide were phosphorylated. VY001 exhibited binding to the peptide when 5202 and T205 were singly phosphorylated, and all three doubly phosphorylated peptides.

[1669] VY0I1 exhibited binding to the peptide when S199 was singly phosphorylated, as well as when the peptide was doubly phosphorylated at pS199/pT205, pS202/pT205, and pS199/pS202. VY0I1 showed strongest binding to the peptide when all three sites (pS199/pS202/pT205) were phosphorylated. Notably, VY011 was the only antibody which exhibited binding to the peptide when S199 was singly phosphorylated. As shown in Table 14, VY0I1 exhibited nanomolar binding to the pS199 peptide, whereas neither VY020 nor AT8 exhibited binding to the peptide, as assessed by BLI.

TABLE 14
Specificity of VY011 for pS199 by BLI

| Antibody | KD (nM) |
|---|---|
| pS199 Ab (positive control) | 0.004 |
| hIgG1 isotype control | no binding |
| AT8 | no binding |
| VY011 | 1.049 |
| VY020 | no binding |
| VY003 | no binding |
| VY006 | no binding |
| VY007 | no binding |
| VY001 | no binding |

[1670] In addition, neither VY0I1 nor VY020 were found to bind to the AT270 peptide (pT181; Tau172-186) by one point ELISA.

[1671] These results collectively suggest that the VY003, VY007, VY006, VY011, and VY001 antibodies exhibit a distinct pattern of binding to phosphorylated tau species compared to AT8, and that VY011 uniquely binds to the tau peptide singly phosphorylated at S199. Distinct binding patterns of these four antibodies were also observed relative to each other.

### Example 8. Fine Epitope Mapping of PT3 Bin Antibodies

[1672] This Example describes the further characterization of the binding specificity of antibodies tentatively categorized as belonging to the PT3 bin (e.g., VY004, VY005, VY002, and VY008).

[1673] To assess the binding characteristics of VY004, VY005, VY002, and VY008, the ability of these antibodies to bind to different phosphorylated species of the Tau204-222 peptide was tested by one point ELISA using a high resolution sub-phospho-peptide library, in the manner described in Example 7. OD values (450 nm) were collected (as shown in Tables 16 and 18), where a stronger positive signal is shown as a higher OD value, which is indicative of increased binding.

[1674] Table 15 lists the Tau204-222 phospho-peptides used in the binding assay, and Table 16 summarizes the specific binding patterns of the antibodies to the phospho-peptides.

TABLE 15
Tau204-222 phospho-peptides

| SEQ | | |
|---|---|---|
| ID | Description | Sequence |
| 1421 | pT212 | GTPGSRSR(pT)PSLPTPPTRE |
| 1422 | pS214 | GTPGSRSRTP(pS)LPTPPTRE |
| 1423 | pT217 | GTPGSRSRTPSLP(pT)PPTRE |
| 1424 | pT212/ | GTPGSRSR(pT)P(pS)LPTPPTRE |
| | pS214 | |
| 1425 | pT212/ | GTPGSRSR(pT)PSLP(pT)PPTRE |
| | pT217 | |
| 1426 | pS214/ | GTPGSRSRTP(pS)LP(pT)PPTRE |
| | pT217 | |
| 1427 | pT212/ | GTPGSRSR(pT)P(pS)LP(pT) |
| | pS214/ | PPTRE |
| | pT217 | |

TABLE 16
Binding assay for PT3 bin antibodies (OD values at 450 nm)

| SCBiot-(dPEG4)- | | | | | hIgG1 | | |
|---|---|---|---|---|---|---|---|
| peptide (Tau204- | | | | | isotype | PT3- | |
| 222) | VY004 | VY005 | VY002 | VY008 | cont. | hIgG1 | AT100 |
| pT212 | 0.082 | 0.087 | 0.055 | 0.112 | 0.060 | 3.162 | 0.069 |
| pS214 | 0.069 | 0.092 | 0.058 | 0.143 | 0.061 | 3.142 | 0.065 |
| pT217 | 0.287 | 2.967 | 0.068 | 3.134 | 0.083 | 3.132 | 0.068 |
| pT212, pS214, pT217 | 0.795 | 0.789 | 0.060 | 2.418 | 0.053 | 3.166 | 0.187 |
| pT212, pS214 | 0.067 | 0.111 | 0.055 | 0.186 | 0.059 | 3.142 | 0.071 |
| pS214, pT217 | 0.207 | 2.468 | 0.062 | 2.825 | 0.059 | 3.131 | 0.067 |
| pT212, pT217 | 2.623 | 2.593 | 0.060 | 3.123 | 0.057 | 3.158 | 0.069 |

[1675] As shown in Table 16, VY004, VY005, VY002, and VY008 showed distinct binding patterns compared to PT3 for Tau204-222 phospho-peptide species. PT3 exhibited binding to all single, double, and triple phosphorylated peptides tested.

[1676] VY004 exhibited binding when the peptide was singly phosphorylated at T217, when doubly phosphorylated at p214/pT217 and pT212/pT217 (albeit substantially more weakly for pw214/pT217), and when triply phosphorylated (pT212/p-214/pT217). VY005 and VY008 showed similar binding patterns, with both binding when the peptide was singly phosphorylated at T217, doubly phosphorylated at pS214/pT217 and pT212/pT217, and when triply phosphorylated (pT212/pS214/pT217). VY002 did not bind to any of the phosphorylated peptides in this experiment.

[1677] Further testing was done with additional peptides spanning the PT3 epitope having a different length than the Tau204-222 phosho-peptides described above. Table 17 lists the peptides used in this experiment.

TABLE 17
Additional PT3 peptides

| | | | SEQ |
|---|---|---|---|
| | Speci- | | ID |
| Peptide | ficity | Sequence | NO: |
| AC04 | pT212, | CSR(pT)PSLP(pT)PPTREPK | 1412 |
| | pT217 | | |
| wtTau | AT120 | 219-227 | — |
| C2 | | | |
| tPeptide | pT212, | GTPGSRSR(pT)P(pS)LP(pT) | 1406 |
| 5 | pS214, | PPTRE | |
| (204-222) | pT217 | | |

[1678] As expected, PT3 exhibited binding to all 3 peptides (Table 18). Consistent with the results described above, VY004, VY005, and VY008 all showed binding to the doubly phosphorylated (pT212/pT217) AC04 peptide. VY004, VY005, and VY008 also showed binding to peptide5 (pT212/pS214/pT217), although the binding was weak for VY004 and VY005.

TABLE 18
Binding assay for PT3 bin antibodies (OD values at 450 nm)

| | | | | | | hIgG1 isotype |
|---|---|---|---|---|---|---|
| Peptides | VY004 | VY005 | VY008 | PT3-hIgG1 | IPN002-hIgG1 | control |
| AC04 | 2.850 | 2.825 | 2.963 | 2.802 | 0.211 | 0.147 |
| wtTau C2 | 0.169 | 0.153 | 0.125 | 1.202 | 0.161 | 0.124 |
| tPeptide5 | 0.382 | 0.288 | 2.872 | 2.806 | 0.281 | 0.141 |

[1679] These results collectively suggest that the VY004, VY005, and VY008 exhibit a distinct pattern of binding to phosphorylated tau species compared to PT3. Additionally, VY005 and VY008 appear to require phosphorylation of T217 for binding.

### Example 9. Fine Epitope Mapping of AT180 Bin Antibodies

[1680] This Example describes the further characterization of the binding specificity of antibodies tentatively categorized as belonging to the AT180 bin (i.e., VY009, VY018, and VY019).

[1681] Screening of the overlapping phospho-peptide library identified all three antibodies as binding to a similar region as AT180, as demonstrated by their binding to the phospho-peptide (pT)PP(pT)REPKKVAVVR(pT)PPK (Tau217-234; SEQ ID NO: 1428) (Table 19), as assessed by BLI.

TABLE 19
Binding affinity of AT180 bin antibodies
for Tau217-234 phospho-peptide

| Antibody | KD (nM) |
|---|---|
| AT180 | 0.005 |
| VY009 | 0.31 |
| VY018 | 4.08 |
| VY019 | 3.7 |

[1682] Next, the ability of the three antibodies to bind to an AT180 peptide singly phosphorylated at T231 was tested (Tau225-240: KVAVVR(pT)PPKSPSSAK; SEQ ID NO: 1429). As shown in Table 20, all three antibodies exhibited binding to the pT231 peptide in the nanomolar/subnanomolar range, as assessed by BLI.

TABLE 20
Binding affinity of AT180 bin antibodies
for pT231 phospho-peptide

| Antibody | KD (nM) |
|---|---|
| AT180 | 0.006 |
| hIgG1 isotype | no binding |
| control | |
| pT231 mAb | 1.950 |
| VY009 | 0.439 |
| VY018 | 3.649 |
| VY019 | 11.539 |

[1683] Finally, the ability of the three antibodies to bind to an AT180 peptide having different combinations of phosphorylated residues were tested using ELISA. The phospho-peptides used in the experiment are shown in Table 21.

TABLE 21
AT180 phospho-peptides

| SEQ ID | Description | Sequence |
|---|---|---|
| 1429 | pT231 | KVAVVR(pT)PPKSPSSAK |
| 1430 | pS235 | KVAVVRTPPK(pS)PSSAKPS |
| 1431 | pT231/pS235 | KVAVVR(PT)PPK(pS)PSSAKPS |

[1684] As shown in FIG. 3, while VY009, VY018, and AT180 (and to a small extent VY019) exhibited binding to the pT231 phospho-peptide and pT231/pS235 phospho-peptide, none of the antibodies exhibited binding to the pS235 phospho-peptide.

### Example 10. Immunodepletion Screening

[1685] Variable domain nucleic acid sequences from anti-tau antibodies were subjected to immunodepletion assay screening. Immunodepletion assays analyze the ability of antibody candidates to deplete target antigens from solution by assessing altered properties associated with the depleted solution. Here, tau RD Biosensor cells were used to analyze tau aggregation induced by ePHF in supernatants obtained from solutions subjected to immunodepletion with candidate antibodies. RD Biosensor cells yield a fluorescent signal in response to tau aggregation. For the assay, 500 nM to 0.8 nM antibody solutions (5 dilutions tested in total) were incubated for 30 minutes at room temperature with 10 mg/ml solutions of Protein G Dynabeads to yield antibody-coated beads. 10 nM ePHF was diluted in phosphate buffered saline and sonicated prior to incubation with antibody-coated bead preparations for 90 minutes at room temperature. Supernatant was then collected and diluted 1:5 before incubation at room temperature for 20 minutes with 1:1 lipofectamine 2000 (Thermo Fisher Scientific, Waltham, MA) in optimem (Thermo Fisher Scientific). 20 μl of the resulting solution was added to biosensor cell cultures (150 μl final medium volume). Cells were cultured for two days before fixation for fluorescence analysis. Nuclei were stained with Draq5 stain and nine 10× images per well (triplicate wells per condition) were captured by Cytation 5. Percentage of cells with tau aggregates was determined for each well and normalized against cells treated with MOPC-21 IgG control beads, which were used in parallel as a seeding control. Antibodies demonstrating tau aggregation inhibition in initial analyses were selected for dose response curve analysis to determine half maximal inhibitory concentration (IC50) for inhibiting tau aggregation. Average IC50 values (based on geometric mean) for each candidate antibody tested are shown in Table 21A.

TABLE 21A
Aggregation inhibition

| Antibody | Average IC50 (nM) |
|---|---|
| VY007 | 36.3 |
| VY004 | 9.39 |
| VY006 | 8.3 |
| VY011 | 18.08 |
| VY018 | 36.08 |
| VY001 | 12.5 |

[1686] Multiple antibodies demonstrated tau aggregation inhibition IC50 values of less than 40 nM, with VY001, VY006, VY004, and VY0I1 having IC50 values below 20 nM. These antibodies demonstrated functional inhibition of ePHF-seeding activity with desirable IC50s.

### Example 11. Tissue Staining

[1687] Variable domain nucleic acid sequences from anti-tau antibodies were tested for ability to bind pathological tau in human brain tissue sections. Cryo-preserved human brain tissue sections from patients with or without Alzheimer's Disease (AD) or progressive supranuclear palsy (PSP) were mounted on glass slides and washed with PBS. Endogenous peroxidase activity in tissue sections was quenched for 30 minutes at room temperature using a solution of 0.9% hydrogen peroxide and 0.02% Triton-X 100 in 1× PBS. Tissue sections were then washed with PBS and incubated for 1 hour at room temperature with a blocking solution of 10% normal goat serum in PBS with 0.02% Triton-X 100. Candidate antibody solutions were prepared by 1:500 dilution in PBS with protein diluent. Tissue sections were incubated in candidate antibody solutions for 1 hour at room temperature before washing in PBS to remove unbound antibody. Tissue sections were then treated with solutions of biotinylated goat-anti mouse IgG in PBS with protein diluent and incubated for 1 hour at room temperature. Tissue sections were again washed in PBS and treated with a solution of avidin-peroxidase conjugate before incubation for 30 minutes at room temperature. Tissue sections were again washed in PBS prior to treatment with a 3,3′ diaminobenzidine tetrahydrochloride (DAB) substrate solution to yield a brown enzymatic precipitate at sites of candidate antibody binding and peroxidase immunocomplex formation. Enzymatic reactions were allowed to proceed for about 1 minute before being halted by rinsing in PBS wash solution. Tissue sections were then mounted for microscopic evaluation of immunostaining (indicating candidate antibody binding). Results are shown in Table 21B.

TABLE 21B
Aggregation inhibition

| Sample | | | | | | | |
|---|---|---|---|---|---|---|---|
| (IHC) | Criteria | VY006 | VY007 | VY001 | VY011 | VY004 | VY018 |
| Fixed- | Positive | Positive | Positive | Positive | Positive | Positive | Positive |
| Human | | | | | | | |
| AD brain | | | | | | | |
| Fixed- | Negative | Negative | Negative | Negative | Negative | Negative | Negative |
| Human | | (Nu) | | | | | |
| Ctl brain | | | | | | | |
| Fixed- | | Positive | Positive | Positive | Positive | Positive | Wk |
| Human | | | (Nu) | | | | Positive |
| PSP | | | | | | | |
| Fixed- | | Negative | Negative | Negative | Negative | Negative | Negative |
| Human | | (Nu) | | | | | |
| Ctl brain | | | | | | | |
| Frozen- | | Positive | Positive | Positive | Positive | Positive | Wk |
| Human | | | | | | | Positive |
| AD brain | | | | | | | |
| Frozen- | Positive | Positive | Positive | Positive | Positive | Wk | Wk |
| Human | | | | | | Positive | Positive |
| PSP | | | | | | | |
| Frozen- | Negative | Negative | Negative | Negative | Negative | Negative | Negative |
| Human | | (Nu) | | | | | |
| Ctl Brain | | | | | | | |

Nu: nuclear;
Wk: weak

[1688] Antibodies VY006, VY007, VY001, VY011, VY004, and VY018 bind specifically to tau pathology on the cortical sections of AD and PSP samples, but not non-AD, non-tauopathy samples.

### Example 12. Inhibition of Tau Pathology by Anti-Tau Antibodies in Hippocampal P301A Seeding Model

[1689] In this Example, the AD-PHF seeded hippocampal P301S model was used for in vivo efficacy studies.

[1690] Briefly, AD brain-derived PHFs were injected into the left hippocampus of 8-week-old P301S mice. To test efficacy of the anti-tau antibodies, the antibodies were administered one week before surgery (2 doses). Five additional doses were administered weekly after surgery. At the end of six weeks after surgery, hippocampi of each animal were isolated for AT8 ELISA to assess tau pathology.

[1691] First, the ability of injected PHFs to induce tau pathology was determined in P301S mice without the injection of anti-tau antibodies. As shown in FIG. 4A, a significant increase of AT8 immunoreactivity (IR) was observed in the PHF injected ipsilateral site, but not in vehicle (PBS) injected site, of mice at 6 weeks after PHF injection. In Tau seed injected mice, tau pathology was also detected in the contralateral site to a lesser extent, indicating tau pathology induced by injected PHF can spread across the hippocampus. Tau pathology was also detected by IHC staining with AT100 anti-tau antibody (FIG. 4B). A significant number of CA neurons on the ipsilateral site exhibited tau pathology (AT100 positives).

[1692] FIGS. 5A and 5B show the results of P301S mice injected with both PHFs and antibodies VY007, VY004, VY006, VY011, and VY018, with tau pathology from each treatment group normalized to the IgG control. There was no significant reduction of tau pathology detected in the ipsilateral site of the hippocampus for VY004, VY006, and VY011. However, there was a significant reduction of tau pathology (53%) in the ipsilateral site of the hippocampus from mice treated with VY018, and a trend of reduction of tau pathology (33%) in mice treated with VY007. As expected, there was a significant reduction of tau pathology with the positive control antibodies PHF-1 and Ab01 (a murine anti-tau antibody, referred to as V0022 and characterized in WO 2021/211753, the contents of which are hereby incorporated by reference in its entirety).

[1693] These results demonstrate that anti-tau antibodies VY018 and VY007 reduce tau pathology in the in vivo P301S mouse model.

### Example 13. Maturation of TTD-001 Capsid in NHPs

[1694] This Example describes maturation of the TTD-001 (SEQ ID NO: 3623 (DNA) and 3636 (amino acid), comprising SEQ ID NO: 3648) capsid variant to further enhance its transduction and biodistribution in the central nervous system and evolve the AAV capsid variants further. Two approaches were used to mature the TTD-001 capsid sequence in order to randomize and mutate within and around the peptide insert comprised within loop VIII of the capsid variant. In the first maturation approach, sets of three contiguous amino acids were randomized across the mutagenesis region in the TTD-001 sequence, which spanned from position 587 to position 602, numbered according to SEQ ID NO: 3636. In the second maturation approach, mutagenic primers were used to introduce point mutations at a low frequency, scattered across the mutagenesis region in the TTD-001 sequences ranging from position 587 to position 602, numbered according to SEQ ID NO: 3636. AAV capsid variants arising from each maturation approach for TTD-001 were pooled together, for subsequent testing and characterization in NHPs (Macaca fascicularis and Callithrix jacchus).

[1695] The library of pooled matured AAV capsid variants generated from TTD-001 matured AAV capsid variant were injected into two cynomolgus macaques (Macaca fascicularis), two marmosets (Callithrix jacchus). After a period in life, the brains of the NHPs were isolated and RNA was extracted from three samples per NHP. Following RNA recovery and RT-PCR amplification, a systematic NGS enrichment analysis was performed to calculate the fold enrichment ratio relative to the corresponding TTD-001 control, and the peptides comprised within the variants were identified. The coefficient of variance (CV) was calculated for each peptide across the six samples, and those that had a CV value <1 were identified, as these were the peptides that were reliably detected in 5/6 or 6/6 of the brain samples isolated from the two NHPs. The average number of reads for each peptide across the samples investigated was also quantified. These TTD-001 matured capsid variants and their peptide sequences are provided in Table 41 (cynomolgus macaques (Macaca fascicularis)) and Table 42 (marmosets (Callithrix jacchus)).

[1696] As shown in Table 41, approximately 338 TTD-001 matured capsid variants demonstrated increased expression relative to the non-matured TTD-001 control, and several variants demonstrated greater than a two-fold enrichment relative to the non-matured TTD-001 control, in cynomolgus macaques (Macaca fascicularis). Also, across the peptides comprised within the TTD-001 matured capsid variants with the greatest fold-enrichment relative to the non-matured TTD-001 capsid in the brains of cynomolgus macaques, it was observed that the modifications in the variant sequences appeared in the C-terminal portion, specifically at residues corresponding to positions 593-595 of a reference sequence numbered according to the amino acid sequence of SEQ ID NO: 138. Additionally, 378 of the top peptides in Table 41 had an average read value of 1 or greater per sample, demonstrating that more functional capsid material was recovered, which could be indicative of less aggregation.

[1697] As shown in Table 42, many TTD-001 matured capsid variants demonstrated increased expression relative to both the AAV9 and the non-matured TTD-001 controls in the brains of marmosets. Approximately, 967 TTD-001 matured variants demonstrated increased expression relative to the non-matured TTD-001 control in the brain of marmosets, with 296 variants showing at least a 10-fold enrichment or greater relative to the non-matured TTD-001 control. Approximately, 850 TTD-001 matured variants demonstrated increased expression relative to AAV9 in the brain of marmosets, with 222 variants showing at least a 10-fold enrichment or greater relative to AAV9. With respect to those TTD-001 matured variants that demonstrated an increased expression in marmosets, it was observed that the majority comprised an amino acid other than Q at position 604 (e.g., Q604) numbered according to SEQ ID NO: 5, 8, or 3636 or at position 597 (Q597) numbered according to SEQ ID NO: 138 (e.g., an E, H, K, or P), such that they comprised the triplet “VEN,” “VHN,” “VKN,” or “VPN” at their C-terminus (corresponding to positions 596-598 of SEQ ID: 138 or positions 603-605 of SEQ ID NO: 5, 8, and 3636). Many of these TTD-001 matured variants also demonstrated an increased expression in the brain of cynomolgus macaques relative to AAV9 (Table 42), including the TTD-001 matured capsid variant comprising the sequence PLNGAVHLYAQAQLSPVKN (SEQ ID NO: 566) and the TTD-001 matured capsid variant comprising the sequence PLNGAVHLYAQAQTGWVPN (SEQ ID NO: 314).

[1698] The fold-change in expression relative to AAV9 and TTD-001 was also calculated in the DRG, heart, muscle (quadriceps), and liver for the TTD-001 matured variants in cynomolgus macaques. The fold-change in the DRG is shown in Table 42, with several variants showing decreased or comparable expression in the DRG relative to AAV9. These variants also demonstrated comparable or lower expression relative to AAV9 in the heart, muscle, and liver.

[1699] Taken together, these data demonstrate that following two maturation approaches, matured TTD-001 capsid variants with loop VIII modifications were generated with significantly enhanced CNS tropism in NHPs (cynomolgus macaques (Macaca fascicularis) and marmosets (Callithrix jacchus)), compared to the corresponding non-matured TTD-001 capsid variant, which already exhibited a significant fold enrichment over AAV9 in the NHP brain.

TABLE 41
NGS fold-enrichment of TTD-001 matured AAV capsid variants in the brain of NHPs

| | | | Fold | | | | | Fold | |
|---|---|---|---|---|---|---|---|---|---|
| | SEQ | | enrichment | | | SEQ | | enrichment | |
| Peptide | ID | | over TTD- | Avg. | Peptide | ID | | over TTD- | Avg. |
| Sequence | NO: | CV | 001 | Reads | Sequence | NO: | CV | 001 | Reads |
| QLNGAVHLYA | 139 | 0.206 | 5.617 | 0.09 | QLNGYVHLYA | 1138 | 0.513 | 0.626 | 0.09 |
| QAQLSPVQN | | | | | QAQTGWVQN | | | | |
| PLDGAVHLYA | 140 | 0.829 | 5.133 | 4.02 | QLNGAVHLYA | 639 | 0.845 | 0.626 | 0.09 |
| QPQTGWVQN | | | | | QAQTTGVQN | | | | |
| QLNGAVHLYA | 141 | 0.770 | 4.088 | 0.09 | PLNGAVHLYA | 640 | 0.602 | 0.625 | 39.96 |
| QAQTMSVQN | | | | | QAQTGFVQN | | | | |
| PLDSSVHLYA | 142 | 0.882 | 3.891 | 1.4 | PLNGAVHLYA | 641 | 0.536 | 0.625 | 42.62 |
| QAQTGWVQN | | | | | QAQSALVQN | | | | |
| PLNGAVHLYA | 143 | 0.879 | 3.879 | 5.47 | ALNGAVHLYA | 642 | 0.278 | 0.624 | 0.75 |
| QAQTTKVQN | | | | | QAQTGWDQN | | | | |
| PLDGAVHLYA | 144 | 0.586 | 3.835 | 11.08 | QLNGAVHLYA | 643 | 0.636 | 0.623 | 0.09 |
| QAQTGSVQN | | | | | QAQISGVQN | | | | |
| ALNGAVHLYA | 145 | 0.865 | 3.765 | 0.09 | QLNGAVHLYA | 644 | 0.520 | 0.623 | 0.14 |
| QAQTTSVQN | | | | | QAQRGSVQN | | | | |
| PLNGSVHLYA | 146 | 0.509 | 3.708 | 0.09 | PLNGAVHLYA | 645 | 0.270 | 0.622 | 0.19 |
| QAQTMSVQN | | | | | QAQTGWVKT | | | | |
| QLNGAVHLYA | 147 | 0.310 | 3.638 | 0.14 | PLNGAVHLYA | 646 | 0.554 | 0.619 | 27.62 |
| QAQTSPVQN | | | | | QAQSQLVQN | | | | |
| PLNGAVHLYA | 148 | 0.547 | 3.634 | 5.61 | PLNGSVHLYA | 647 | 0.202 | 0.617 | 0.33 |
| QAQTMKVQN | | | | | QAQTGWGQN | | | | |
| PLNGAVHLYA | 149 | 0.397 | 3.550 | 21.87 | QLNGAVHLYA | 648 | 0.632 | 0.616 | 0.14 |
| QAQVAQVQN | | | | | QAQTGWVPN | | | | |
| PLDGAVHLYA | 150 | 0.771 | 3.509 | 2.29 | PLNGAVHLYA | 649 | 0.305 | 0.615 | 0.33 |
| QAQTGGVQN | | | | | KAQTGWVKN | | | | |
| PLNGAVHLYA | 151 | 0.344 | 3.373 | 0.09 | PLNGAVHLYA | 650 | 0.164 | 0.615 | 0.09 |
| QAQTAWDQN | | | | | HAQTGWGQN | | | | |
| PLNGSVHLYA | 152 | 0.190 | 3.335 | 0.23 | ALNGAVHLYA | 651 | 0.330 | 0.613 | 0.61 |
| QAQTGWDQN | | | | | QAQTGWVQH | | | | |
| PLNGAVHLYA | 153 | 0.235 | 3.287 | 0.14 | PLNGSVHLYA | 652 | 0.585 | 0.612 | 0.14 |
| QAQTGSVQH | | | | | QAQIASVQN | | | | |
| PLNGAVHLYA | 154 | 0.564 | 3.259 | 4.25 | ALNGAVHLYA | 653 | 0.416 | 0.611 | 0.14 |
| QAQVKQVQN | | | | | QAQTAMVQN | | | | |
| PLNGAVHLYA | 155 | 0.763 | 3.239 | 24.54 | TLNGAVHLYA | 654 | 0.316 | 0.610 | 0.09 |
| QAQSAPVQN | | | | | QAQTMAVQN | | | | |
| PLNGAVHLYA | 156 | 0.591 | 3.156 | 6.73 | PHNGAVHLYA | 655 | 0.476 | 0.609 | 0.09 |
| QAQLSKVQN | | | | | QAQVSSVQN | | | | |
| PLNGAVHLYA | 157 | 0.587 | 3.107 | 31.03 | PLNGAVQLYA | 656 | 0.693 | 0.606 | 0.09 |
| QAQLAPVQN | | | | | QAQTAPVQN | | | | |
| PLNGAVHLYA | 158 | 0.416 | 3.061 | 15.33 | PLNGSVHLYA | 657 | 0.282 | 0.605 | 0.09 |
| QAQLAQVQN | | | | | QAQKGSVQN | | | | |
| QLNGAVHLYA | 159 | 0.295 | 3.051 | 0.09 | PLNGAVHLYA | 658 | 0.574 | 0.605 | 39.3 |
| QAQVASVQN | | | | | QAQLSAVQN | | | | |
| PLNGAVHLYA | 160 | 0.877 | 2.998 | 8.97 | PINGAVHLYA | 659 | 0.489 | 0.605 | 0.09 |
| QAQTAKVQN | | | | | QAQVSAVQN | | | | |
| PLNGAVHLYA | 161 | 0.678 | 2.971 | 3.27 | PLNGSVHLYA | 660 | 0.514 | 0.604 | 43.37 |
| QAQSAKVQN | | | | | QAQTGLVQN | | | | |
| PLNGAVHLYA | 162 | 0.095 | 2.962 | 0.09 | PLNGAVHIYA | 661 | 0.223 | 0.604 | 0.14 |
| QAQTGCFQN | | | | | QAQTGWFQN | | | | |
| PLNGAVHLYA | 163 | 0.705 | 2.958 | 5.51 | SLNGAVHLYA | 662 | 0.293 | 0.603 | 0.09 |
| QAQTQKVQN | | | | | QAQIASVQN | | | | |
| PLNGSVHLYA | 164 | 0.529 | 2.873 | 0.09 | PLNGAVHLYA | 663 | 0.220 | 0.601 | 0.14 |
| QAQTTSVQN | | | | | QEQTVSVQN | | | | |
| PLNGGVHLYA | 165 | 0.820 | 2.858 | 4.25 | PLNGAVHLYA | 664 | 0.737 | 0.601 | 0.09 |
| QAQTGRVQN | | | | | QAQTMQVQT | | | | |
| PLNGAVHLYA | 166 | 0.410 | 2.854 | 30.94 | HLNGAVHLYA | 665 | 0.338 | 0.600 | 56.78 |
| QAQTVAVQN | | | | | QAQTGWVQN | | | | |
| ALNGAVHLYA | 167 | 0.542 | 2.851 | 0.09 | PLNGAVHLYA | 666 | 0.400 | 0.600 | 24.02 |
| QAQSSPVQN | | | | | QAQTGQVQN | | | | |
| PLNGAVHLYA | 168 | 0.313 | 2.820 | 63.28 | QLNGAVHLYA | 667 | 0.596 | 0.599 | 0.19 |
| QAQLSPVQN | | | | | QAQTGWVQD | | | | |
| QLNGAVHLYA | 169 | 0.846 | 2.769 | 0.14 | PLNGAVHLYD | 668 | 0.526 | 0.599 | 0.09 |
| QAQTTSVQN | | | | | QAQVAQVQN | | | | |
| PLNGAVHLYA | 170 | 0.334 | 2.719 | 18.37 | PLNGAVHLYA | 669 | 0.515 | 0.598 | 0.19 |
| QAQTTQVQN | | | | | QAQTSPVKN | | | | |
| PLNGAVHLYA | 171 | 0.523 | 2.707 | 25.84 | PLNGAIHLYA | 670 | 0.383 | 0.595 | 0.09 |
| QAQTAQVQN | | | | | QAQTSPVQN | | | | |
| QLNGAVHLYA | 172 | 0.195 | 2.682 | 0.09 | PLNGSVHLYA | 671 | 0.578 | 0.595 | 0.19 |
| QAQTVAVQN | | | | | QAQTAMVQN | | | | |
| PLNGAVHLYA | 173 | 0.682 | 2.652 | 3.27 | PLNGAVHLYA | 672 | 0.370 | 0.594 | 0.09 |
| QAQRIAVQN | | | | | QAQLSQVQT | | | | |
| PLNGAVHLYA | 174 | 0.340 | 2.634 | 17.34 | PLNGAVHLYA | 673 | 0.310 | 0.594 | 0.19 |
| QAQRASVQN | | | | | QAQTGSVLN | | | | |
| PLNGAVHLYA | 175 | 0.400 | 2.620 | 45.19 | PLNGAIHLYA | 674 | 0.428 | 0.593 | 0.09 |
| QAQTTPVQN | | | | | QAQTASVQN | | | | |
| QLNGAVHLYA | 176 | 0.474 | 2.613 | 0.09 | PLNGAVHLYA | 675 | 0.785 | 0.592 | 6.68 |
| QAQLASVQN | | | | | QAQTNGVQN | | | | |
| PLNGAVHLYA | 177 | 0.528 | 2.574 | 39.86 | PLNGSVHLYA | 676 | 0.334 | 0.591 | 0.14 |
| QAQLTPVQN | | | | | QAQTGWVQY | | | | |
| PLNGAVHLYA | 178 | 0.519 | 2.572 | 26.5 | PLNGALHLYA | 677 | 0.463 | 0.590 | 0.09 |
| QAQSTPVQN | | | | | QAQTSPVQN | | | | |
| PLNGAVHLYA | 179 | 0.335 | 2.562 | 72.81 | ALNGAVHLYA | 678 | 0.399 | 0.589 | 1.59 |
| QAQTSPVQN | | | | | QAQTGWVQT | | | | |
| QLNGAVHLYA | 180 | 0.428 | 2.528 | 0.09 | PLNGAVHLYA | 679 | 0.193 | 0.586 | 0.47 |
| QAQVSQVQN | | | | | QAQTGWVKK | | | | |
| PLNGAVHLYA | 181 | 0.625 | 2.523 | 19.96 | QLNGAVHLYA | 680 | 0.630 | 0.584 | 1450 |
| QAQTMQVQN | | | | | QAQTGWVQN | | | | |
| PLNGAVHLYA | 182 | 0.458 | 2.476 | 8.32 | PLNGDVHLYA | 681 | 0.630 | 0.580 | 0.09 |
| QAQTSKVQN | | | | | QAQTVAVQN | | | | |
| SLNGAVHLYA | 183 | 0.282 | 2.417 | 0.09 | PLNGGVHLYA | 682 | 0.501 | 0.580 | 0.47 |
| QAQVSPVQN | | | | | QAQPGWVQN | | | | |
| PLNGAVHLYA | 184 | 0.259 | 2.411 | 34.72 | PLNGAVHLYA | 683 | 0.897 | 0.579 | 7.66 |
| QAQVSQVQN | | | | | QAQAAAVQN | | | | |
| PLNGAVHLYA | 185 | 0.721 | 2.404 | 63.42 | PLNGAVHLYA | 684 | 0.618 | 0.579 | 19.72 |
| QAQVSPVQN | | | | | QAQSAVVQN | | | | |
| PLNGAVHLYA | 186 | 0.586 | 2.389 | 15.56 | TLNGAVHLYA | 685 | 0.646 | 0.578 | 0.09 |
| QAQTVQVQN | | | | | QAQRSSVQN | | | | |
| PLNGAVHLYA | 187 | 0.476 | 2.367 | 13.65 | PLNGAVHLYA | 686 | 0.214 | 0.578 | 0.14 |
| QAQVTAVQN | | | | | QAQPGWVQH | | | | |
| PLNGAVHLYA | 188 | 0.715 | 2.353 | 8.74 | PLDGAVHLYA | 687 | 0.214 | 0.577 | 0.09 |
| QAQRQPVQN | | | | | QAQTLSVQN | | | | |
| PLNGNVHLYA | 189 | 0.732 | 2.346 | 2.38 | PLNGAVHLYA | 688 | 0.310 | 0.575 | 0.19 |
| QAQTGGVQN | | | | | QAQTASDQN | | | | |
| PLDGAVHLYA | 190 | 0.697 | 2.339 | 7.06 | PLNGAVHLYA | 689 | 0.633 | 0.575 | 53.51 |
| QAQTAWVQN | | | | | QAQLSGVQN | | | | |
| PLNGAVHLYA | 191 | 0.785 | 2.331 | 9.91 | TLNGAVHLYA | 690 | 0.463 | 0.572 | 0.14 |
| QAQISGVQN | | | | | QAQTVAVQN | | | | |
| PLNGAVHLYA | 192 | 0.794 | 2.324 | 6.22 | PLNGAVHLYA | 691 | 0.293 | 0.572 | 0.09 |
| QAQVRPVQN | | | | | QEQVASVQN | | | | |
| PLNGAVHLYA | 193 | 0.722 | 2.299 | 20.47 | PVNGAVHLYA | 692 | 0.873 | 0.572 | 0.09 |
| QAQLGPVQN | | | | | QAQTGWAQN | | | | |
| PLNGAVHLYA | 194 | 0.404 | 2.290 | 4.91 | PLNGAVHLYA | 693 | 0.567 | 0.570 | 14.07 |
| QAQTNQVQN | | | | | QAQSSRVQN | | | | |
| PLNGAVHLYA | 195 | 0.291 | 2.240 | 14.39 | PLNGSVHLYA | 694 | 0.551 | 0.569 | 0.19 |
| QAQVQQVQN | | | | | QAQLGSVQN | | | | |
| PLNGAVHLYA | 196 | 0.520 | 2.238 | 9.21 | PLNGAVHLYA | 695 | 0.565 | 0.568 | 1.22 |
| QAQVANVQN | | | | | QAQSPPVQN | | | | |
| PLNGAVHLYA | 197 | 0.664 | 2.200 | 10.75 | PLNGAVHHYA | 696 | 0.605 | 0.567 | 0.14 |
| QAQAAPVQN | | | | | QAQTTSVQN | | | | |
| QLNGAVHLYA | 198 | 0.388 | 2.199 | 0.09 | PLNGAVHLYD | 697 | 0.832 | 0.567 | 0.09 |
| QAQVAQVQN | | | | | QAQSTPVQN | | | | |
| PLNGAVHLYA | 199 | 0.487 | 2.195 | 21.59 | QLNGAVHLYA | 698 | 0.529 | 0.567 | 0.37 |
| QAQRSTVQN | | | | | QAQTGWVRN | | | | |
| PLNGAVHLYA | 200 | 0.334 | 2.190 | 29.72 | PLNGAVHLYA | 699 | 0.597 | 0.563 | 0.09 |
| QAQTMAVQN | | | | | QAQVQPVQT | | | | |
| PLNGAVHLYA | 201 | 0.838 | 2.182 | 7.1 | PLNGAVHLYA | 700 | 0.416 | 0.562 | 0.14 |
| QAQIQPVQN | | | | | QAQTSSVKN | | | | |
| PLNGAVHLYA | 202 | 0.567 | 2.181 | 15.52 | PLNGALHLYA | 701 | 0.301 | 0.560 | 0.09 |
| QAQIASVQN | | | | | QAQTASVQN | | | | |
| PLNGAVHLYA | 203 | 0.172 | 2.176 | 76.22 | PLNGAVHHYA | 702 | 0.731 | 0.558 | 0.09 |
| QAQTVSVQN | | | | | QAQSAPVQN | | | | |
| PLNGAVHLYA | 204 | 0.585 | 2.156 | 12.43 | PLNGSVHLYA | 703 | 0.169 | 0.556 | 0.47 |
| QAQRGSVQN | | | | | QAQTGWVHN | | | | |
| PLNGAVHLYA | 205 | 0.376 | 2.143 | 12.85 | PLNGAVHLYA | 704 | 0.519 | 0.556 | 0.09 |
| QAQNSPVQN | | | | | QAQLSPLQN | | | | |
| PLNGAVHLYA | 206 | 0.363 | 2.131 | 24.3 | PLNGAVHLYA | 705 | 0.841 | 0.554 | 0.09 |
| QAQLQPVQN | | | | | KAQVTPVQN | | | | |
| PLNGAVHLYA | 207 | 0.550 | 2.125 | 11.68 | PLNGAVNLYA | 706 | 0.278 | 0.554 | 0.09 |
| QAQVTGVQN | | | | | QAQTQPVQN | | | | |
| PLNGAVHLYA | 208 | 0.810 | 2.121 | 11.26 | SLNGAVHLYA | 707 | 0.518 | 0.553 | 92.07 |
| QAQVMQVQN | | | | | QAQTGLVQN | | | | |
| PLNGAVHLYA | 209 | 0.697 | 2.104 | 14.86 | PLDGSVHLYA | 708 | 0.366 | 0.552 | 0.09 |
| QAQSMAVQN | | | | | QAQTGGVQN | | | | |
| PLNGAVHLYA | 210 | 0.611 | 2.104 | 4.49 | PLNGAVHLYD | 709 | 0.528 | 0.552 | 0.09 |
| QAQVGKVQN | | | | | QAQTLPVQN | | | | |
| ALNGAVHLYA | 211 | 0.652 | 2.101 | 0.09 | PLNGAVHLYA | 710 | 0.441 | 0.551 | 0.09 |
| QAQSAPVQN | | | | | QAQVSQVQK | | | | |
| PLNGAVHLYA | 212 | 0.498 | 2.101 | 3.97 | PLNGAVHLYA | 711 | 0.425 | 0.551 | 13.97 |
| QAQIQSVQN | | | | | QAQLVGVQN | | | | |
| PLNGAVHLYA | 213 | 0.537 | 2.097 | 17.15 | PLNGAVHLYA | 712 | 0.390 | 0.549 | 0.09 |
| QAQCSPVQN | | | | | QEQTSSVQN | | | | |
| PLNGAVHLYA | 214 | 0.821 | 2.079 | 3.97 | PLNGAVHIYA | 713 | 0.435 | 0.549 | 0.09 |
| QAQLQRVQN | | | | | QAQTVAVQN | | | | |
| PLNGAVHLYA | 215 | 0.330 | 2.063 | 0.09 | PLNGAVNLYA | 714 | 0.831 | 0.548 | 0.14 |
| QAQTAWVQH | | | | | QAQVTPVQN | | | | |
| PLDGAVHLYA | 216 | 0.650 | 2.062 | 0.09 | TLNGAVHLYA | 715 | 0.252 | 0.547 | 0.19 |
| QAQTGWDQN | | | | | QAQTMSVQN | | | | |
| PLNGAVHLYA | 217 | 0.411 | 2.062 | 0.89 | TLNGAVHLYA | 716 | 0.341 | 0.541 | 0.09 |
| QAQTPPVQN | | | | | QAQTLAVQN | | | | |
| PLNGAVHLYA | 218 | 0.635 | 2.054 | 1.68 | PINGAVHLYA | 717 | 0.341 | 0.540 | 0.09 |
| QAQVTKVQN | | | | | QAQVAQVQN | | | | |
| PLNGAVHLYA | 219 | 0.556 | 2.033 | 50.94 | PLNGQVHLYA | 718 | 0.885 | 0.540 | 12.57 |
| QAQSSPVQN | | | | | QAQTGWVQN | | | | |
| PLNGAVHLYA | 220 | 0.793 | 2.015 | 9.07 | QLNGAVHLYA | 719 | 0.892 | 0.540 | 39.63 |
| QAQAGPVQN | | | | | QAQTGGVQN | | | | |
| PLNGAVHLYA | 221 | 0.773 | 2.014 | 5.89 | PLNGAVHLYA | 720 | 0.542 | 0.539 | 0.09 |
| QAQLARVQN | | | | | QAQTLSVKN | | | | |
| PLNGAVHLYA | 222 | 0.789 | 2.013 | 16.36 | PLNGTVHLYA | 721 | 0.331 | 0.538 | 0.37 |
| QAQTTTVQN | | | | | QAQTGWDQN | | | | |
| PLNGAVHLYA | 223 | 0.254 | 2.011 | 0.09 | PLNGAVHLYA | 722 | 0.476 | 0.537 | 0.14 |
| QAQTGGFQN | | | | | QAQTGWFQK | | | | |
| PLNGAVHLYA | 224 | 0.657 | 2.010 | 24.44 | ALNGAVHLYA | 723 | 0.447 | 0.536 | 0.09 |
| QAQTLQVQN | | | | | QAQTSKVQN | | | | |
| PLNGAVHLYA | 225 | 0.359 | 2.005 | 63.42 | ALNGTVHLYA | 724 | 0.712 | 0.535 | 49.16 |
| QAQTMSVQN | | | | | QAQTGWVQN | | | | |
| QLNGAVHLYA | 226 | 0.675 | 2.004 | 0.09 | PLNGAVPLYA | 725 | 0.256 | 0.534 | 0.14 |
| QAQLQPVQN | | | | | QAQTGWVQH | | | | |
| PLNGAVHLYA | 227 | 0.894 | 1.994 | 10.47 | PLNGAVHLYA | 726 | 0.355 | 0.533 | 0.23 |
| QAQVAKVQN | | | | | QAKTGWVQK | | | | |
| PLNGAVHLYA | 228 | 0.217 | 1.989 | 7.24 | PLNGAVHLYA | 727 | 0.492 | 0.531 | 1.12 |
| QAQRAAVQN | | | | | QAQTPAVQN | | | | |
| PLNGAVHLYA | 229 | 0.413 | 1.988 | 38.79 | PLNGAVHLYA | 728 | 0.538 | 0.531 | 0.14 |
| QAQTVGVQN | | | | | QAQTVGVKN | | | | |
| PLNGAVHLYA | 230 | 0.381 | 1.972 | 15.84 | PLNGAVHLYA | 729 | 0.307 | 0.530 | 0.14 |
| QAQLNPVQN | | | | | QEQTGWFQN | | | | |
| PLNGAVHLYA | 231 | 0.379 | 1.971 | 26.17 | PLNGAVHLYA | 730 | 0.569 | 0.530 | 0.09 |
| QAQLSQVQN | | | | | QAQKGWDQN | | | | |
| PLNGTVHLYA | 232 | 0.421 | 1.967 | 23.37 | PLNGAVHLYD | 731 | 0.605 | 0.529 | 0.09 |
| QAQTGSVQN | | | | | QAQTSAVQN | | | | |
| PLNGAVHLYA | 233 | 0.543 | 1.960 | 12.95 | PLDGAVHLYA | 732 | 0.657 | 0.527 | 0.37 |
| QAQTKPVQN | | | | | QAQTGWVQK | | | | |
| PLNGAVHLYA | 234 | 0.603 | 1.957 | 7.71 | PLNGAVHLYA | 733 | 0.290 | 0.524 | 0.09 |
| QAQTNAVQN | | | | | QAQTAWVLN | | | | |
| ALDGAVHLYA | 235 | 0.660 | 1.955 | 21.4 | PLNGSVHLYA | 734 | 0.172 | 0.524 | 0.28 |
| QAQTGWVQN | | | | | QAQTGWVLN | | | | |
| PLNGAVHLYA | 236 | 0.303 | 1.955 | 22.06 | QLNGAVHLYA | 735 | 0.605 | 0.524 | 1.68 |
| QAQLATVQN | | | | | QAQTGWVQT | | | | |
| PLNGAVHLYA | 237 | 0.794 | 1.947 | 40.85 | PLNGAVHLYA | 736 | 0.699 | 0.524 | 0.98 |
| QAQVTPVQN | | | | | QAQVPPVQN | | | | |
| PLNGAVHLYA | 238 | 0.339 | 1.946 | 22.2 | PVNGAVHLYA | 737 | 0.734 | 0.522 | 0.09 |
| QAQVQAVQN | | | | | QAQVQSVQN | | | | |
| PLNGAVHLYA | 239 | 0.645 | 1.926 | 58.32 | QLNGAVHLYA | 738 | 0.473 | 0.522 | 0.09 |
| QAQTTSVQN | | | | | QAQTKSVQN | | | | |
| PLNGAVHLYA | 240 | 0.702 | 1.923 | 9.21 | PVNGAVHLYA | 739 | 0.825 | 0.522 | 0.23 |
| QAQCTPVQN | | | | | QAQTSSVQN | | | | |
| ALNGAVHLYA | 241 | 0.621 | 1.916 | 9.58 | PLNGAVHLYA | 740 | 0.797 | 0.520 | 11.45 |
| QAQTGRVQN | | | | | QAQATGVQN | | | | |
| PLNGSVHLYA | 242 | 0.173 | 1.908 | 0.09 | TLNGAVHLYA | 741 | 0.553 | 0.518 | 0.09 |
| QAQTGWVQD | | | | | QAQLSQVQN | | | | |
| PLNGAVHLYA | 243 | 0.555 | 1.903 | 30.47 | PLDGAVHLYA | 742 | 0.486 | 0.517 | 0.37 |
| QAQTAGVQN | | | | | QAQTVSVQN | | | | |
| PLNGAVHLYA | 244 | 0.431 | 1.902 | 29.82 | SLNGAVHLYA | 743 | 0.421 | 0.514 | 0.09 |
| QAQTSQVQN | | | | | QAQTKPVQN | | | | |
| PLNGAVHLYA | 245 | 0.443 | 1.895 | 6.4 | PLKGAVHLYA | 744 | 0.705 | 0.514 | 0.09 |
| QAQTMNVQN | | | | | QAQSAPVQN | | | | |
| PLNGAVHLYA | 246 | 0.323 | 1.885 | 34.16 | PLNGAVHLYA | 745 | 0.275 | 0.514 | 0.19 |
| QAQTSTVQN | | | | | QAKTGWVKN | | | | |
| PLNGAVHLYA | 247 | 0.712 | 1.882 | 12.43 | PLNGSVHLYA | 746 | 0.680 | 0.513 | 0.09 |
| QAQVKPVQN | | | | | QAQTLGVQN | | | | |
| PLNGAVHLYA | 248 | 0.627 | 1.878 | 24.91 | PLKGAVHLYA | 747 | 0.626 | 0.512 | 0.09 |
| QAQASPVQN | | | | | QAQLAPVQN | | | | |
| PLNGAVHLYA | 249 | 0.447 | 1.873 | 23.27 | PLNGSVHLYA | 748 | 0.207 | 0.512 | 1.17 |
| QAQVAAVQN | | | | | QAQTGWVQK | | | | |
| PLNGAVHLYA | 250 | 0.692 | 1.869 | 8.74 | PLNGAVHLYA | 749 | 0.295 | 0.511 | 0.28 |
| QAQLKSVQN | | | | | QAQTGGVQI | | | | |
| PLNGAVHLYA | 251 | 0.834 | 1.855 | 8.09 | PLNGAVHLYA | 750 | 0.440 | 0.510 | 0.37 |
| QAQIAAVQN | | | | | QPQTGWVQT | | | | |
| PLNGAVHLYA | 252 | 0.115 | 1.850 | 26.78 | PLNGAVHLYA | 751 | 0.196 | 0.508 | 4.02 |
| QAQTAAVQN | | | | | QAQTGWVLN | | | | |
| PLNGAVHLYA | 253 | 0.742 | 1.850 | 10.05 | PLNGAVHLYD | 752 | 0.611 | 0.507 | 0.14 |
| QAQTKAVQN | | | | | QAQLTPVQN | | | | |
| PLNGAVHLYA | 254 | 0.223 | 1.848 | 0.09 | QLNGAVHLYA | 753 | 0.558 | 0.507 | 0.28 |
| QAQTGSVQS | | | | | QAQTATVQN | | | | |
| PLNGAVHLYA | 255 | 0.518 | 1.845 | 7.66 | PLNGAVHLYA | 754 | 0.359 | 0.505 | 0.19 |
| QAQVSNVQN | | | | | QAQTAWGQN | | | | |
| PLNGAVHLYA | 256 | 0.690 | 1.834 | 38.65 | PLNGAVHLYA | 755 | 0.273 | 0.505 | 6.78 |
| QAQTAPVQN | | | | | QAQTGWVHN | | | | |
| PLNGAVHLYA | 257 | 0.740 | 1.833 | 28.13 | PLKGAVHLYA | 756 | 0.556 | 0.505 | 0.09 |
| QAQLMPVQN | | | | | QAQSSPVQN | | | | |
| PLNGAVHLYA | 258 | 0.798 | 1.824 | 8.88 | PLNGAVHLYA | 757 | 0.374 | 0.505 | 0.09 |
| QAQLHPVQN | | | | | QAQLGSVQT | | | | |
| PLNGAVHLYA | 259 | 0.793 | 1.823 | 5.09 | PLNGAVHLYA | 758 | 0.656 | 0.505 | 7.62 |
| QAQRAQVQN | | | | | QAQSANVQN | | | | |
| PLNGAVHLYA | 260 | 0.871 | 1.823 | 1.92 | PLNGGVHLYA | 759 | 0.866 | 0.503 | 23.27 |
| QAQLTNVQN | | | | | QAQTGSVQN | | | | |
| PLNGAVHLYA | 261 | 0.766 | 1.822 | 13.18 | PLNGAVHLYD | 760 | 0.433 | 0.503 | 0.09 |
| QAQRTTVQN | | | | | QAQRSSVQN | | | | |
| PLNGAVHLYA | 262 | 0.700 | 1.821 | 17.9 | PLNGAVHLYA | 761 | 0.164 | 0.502 | 0.19 |
| QAQTSVVQN | | | | | QAQTGGVQD | | | | |
| SLNGAVHLYA | 263 | 0.867 | 1.819 | 0.14 | PLNGAVHLYA | 762 | 0.271 | 0.502 | 0.09 |
| QAQTMSVQN | | | | | QAQTMAVKN | | | | |
| ALNGAVHLYA | 264 | 0.672 | 1.818 | 0.09 | PLNGAVHLYA | 763 | 0.325 | 0.501 | 0.23 |
| QAQTLAVQN | | | | | QAQTASVKN | | | | |
| PLNGAVHLYA | 265 | 0.736 | 1.816 | 12.2 | PLNGAVHLYA | 764 | 0.531 | 0.501 | 0.14 |
| QAQRMSVQN | | | | | QAQSSPVQK | | | | |
| ALNGAVHLYA | 266 | 0.342 | 1.813 | 0.14 | PLNGAVHLYA | 765 | 0.275 | 0.499 | 21.68 |
| QAQLTPVQN | | | | | QAQTGWVKN | | | | |
| PLNGAVHLYA | 267 | 0.785 | 1.807 | 3.65 | ALNGAVHLYA | 766 | 0.735 | 0.499 | 25.05 |
| QAQVGNVQN | | | | | QAQTGGVQN | | | | |
| PLNGAVHLYA | 268 | 0.615 | 1.805 | 4.91 | PLNGAVHLYA | 767 | 0.676 | 0.498 | 0.09 |
| QAQLMQVQN | | | | | QAQTGTVQT | | | | |
| PLNGSVHLYA | 269 | 0.550 | 1.795 | 0.09 | PLNGAVHLYA | 768 | 0.476 | 0.495 | 7.43 |
| QAQTAQVQN | | | | | QAQTGWVQI | | | | |
| PLNGAVHLYA | 270 | 0.544 | 1.793 | 24.12 | PINGAVHLYA | 769 | 0.382 | 0.494 | 0.09 |
| QAQTATVQN | | | | | QAQTSLVQN | | | | |
| PLNGAVHLYA | 271 | 0.727 | 1.790 | 7.8 | PLNGAVHIYA | 770 | 0.502 | 0.492 | 0.09 |
| QAQVHPVQN | | | | | QAQVAQVQN | | | | |
| PLNGAVHLYA | 272 | 0.836 | 1.771 | 0.09 | PLNGAVHLYA | 771 | 0.279 | 0.491 | 0.19 |
| QAQVSPVQT | | | | | QAQTVWVKN | | | | |
| PLNGAVHLYA | 273 | 0.638 | 1.766 | 9.11 | TLNGAVHLYA | 772 | 0.827 | 0.491 | 0.09 |
| QAQISSVQN | | | | | QAQLMPVQN | | | | |
| PLNGAVHLYA | 274 | 0.333 | 1.765 | 62.16 | PLNGAVHIYA | 773 | 0.672 | 0.490 | 0.09 |
| QAQVASVQN | | | | | QAQTAPVQN | | | | |
| PLNGAVHLYA | 275 | 0.347 | 1.757 | 0.09 | PLYGAVHLYA | 774 | 0.240 | 0.488 | 0.09 |
| QAQTRWDQN | | | | | QAQTASVQN | | | | |
| PLNGAVHLYA | 276 | 0.508 | 1.750 | 8.88 | TLNGAVHLYA | 775 | 0.643 | 0.488 | 0.09 |
| QAQTMTVQN | | | | | QAQLGPVQN | | | | |
| PLNGAVHLYA | 277 | 0.551 | 1.747 | 34.21 | PLDGAVHLYA | 776 | 0.637 | 0.487 | 0.42 |
| QAQRSSVQN | | | | | QAQTGWVKN | | | | |
| PLNGGVHLYA | 278 | 0.547 | 1.743 | 0.09 | PLKGAVHLYA | 777 | 0.669 | 0.487 | 0.14 |
| QAQTGWVRN | | | | | QAQVSPVQN | | | | |
| PLNGAVHLYA | 279 | 0.281 | 1.741 | 213 | PLNGAVHLYA | 778 | 0.563 | 0.486 | 9.95 |
| QAQTAWVQN | | | | | QAQSQQVQN | | | | |
| PLNGSVHLYA | 280 | 0.130 | 1.734 | 0.28 | PLNGAVDLYA | 779 | 0.497 | 0.484 | 0.09 |
| QAQPGWVQN | | | | | QAQLSPVQN | | | | |
| ALNGAVHLYA | 281 | 0.238 | 1.724 | 0.09 | PLNGAVHLYA | 780 | 0.506 | 0.484 | 0.09 |
| QAQTGWAQN | | | | | QAQVGSVQT | | | | |
| PLNGAVHLYA | 282 | 0.791 | 1.724 | 8.93 | PLNGTVHLYA | 781 | 0.405 | 0.483 | 0.14 |
| QAQRTGVQN | | | | | QAQTGWAQN | | | | |
| ALNGAVHLYA | 283 | 0.370 | 1.720 | 0.09 | ALNGAVHLYA | 782 | 0.283 | 0.482 | 0.09 |
| QAQTGWVQS | | | | | QAQTGLVQT | | | | |
| PLNGAVHLYA | 284 | 0.561 | 1.701 | 22.34 | PLNGAVHLYA | 783 | 0.562 | 0.482 | 35.42 |
| QAQVATVQN | | | | | QAQSSMVQN | | | | |
| PLNGAVHLYA | 285 | 0.480 | 1.700 | 16.68 | PLNGAVHLYA | 784 | 0.484 | 0.481 | 0.09 |
| QAQVTSVQN | | | | | KAQTAGVQN | | | | |
| PLNGAVHLYA | 286 | 0.313 | 1.699 | 74.78 | PLNGAVHLYA | 785 | 0.516 | 0.480 | 0.09 |
| QAQVSSVQN | | | | | HAQTGWVQK | | | | |
| PLNGSVHLYA | 287 | 0.353 | 1.683 | 0.14 | PLNGAVHLYA | 786 | 0.502 | 0.479 | 0.23 |
| QAQTSSVQN | | | | | QAQTSPVQK | | | | |
| PLNGAVHLYA | 288 | 0.348 | 1.682 | 18.83 | PLNGAVHLYA | 787 | 0.841 | 0.477 | 7.66 |
| QAQTNSVQN | | | | | QAQAVGVQN | | | | |
| PLNGAVHLYA | 289 | 0.815 | 1.681 | 6.03 | PLNGAVPLYA | 788 | 0.438 | 0.477 | 0.09 |
| QAQVKAVQN | | | | | QAQTGWGQN | | | | |
| PLNGAVHLYA | 290 | 0.689 | 1.666 | 19.02 | PLNGTVHLYA | 789 | 0.495 | 0.477 | 0.09 |
| QAQSGPVQN | | | | | QAQLGSVQN | | | | |
| PLNGAVHLYA | 291 | 0.660 | 1.663 | 25.61 | QLNGAVHLYA | 790 | 0.645 | 0.476 | 0.75 |
| QAQTGPVQN | | | | | QAQTGWVQH | | | | |
| PLNGAVHLYA | 292 | 0.537 | 1.660 | 22.9 | PLNGSVHLYA | 791 | 0.175 | 0.475 | 1.4 |
| QAQTAMVQN | | | | | QAQTGWVKN | | | | |
| PLNGAVHLYA | 293 | 0.358 | 1.628 | 32.11 | PLNGAVHLYD | 792 | 0.812 | 0.475 | 0.09 |
| QAQTQPVQN | | | | | QAQVAPVQN | | | | |
| PLNGSVHLYA | 294 | 0.533 | 1.625 | 32.76 | PLNGAVNLYA | 793 | 0.460 | 0.473 | 0.19 |
| QAQTGSVQN | | | | | QAQVSSVQN | | | | |
| PLNGAVHLYA | 295 | 0.519 | 1.625 | 14.44 | PLNGAVHLYA | 794 | 0.646 | 0.472 | 0.09 |
| QAQTQQVQN | | | | | QAQTLPVQK | | | | |
| PLNGAVHLYA | 296 | 0.824 | 1.620 | 9.86 | PLNGSVHLYA | 795 | 0.337 | 0.469 | 0.93 |
| QAQVSRVQN | | | | | QAQTASVQN | | | | |
| QLNGAVHLYA | 297 | 0.436 | 1.617 | 0.09 | ALNGAVHLYA | 796 | 0.294 | 0.468 | 0.37 |
| QAQVLPVQN | | | | | QAQTGWGQN | | | | |
| PLNGAVHLYA | 298 | 0.266 | 1.610 | 0.14 | PLNGAVHLYA | 797 | 0.286 | 0.468 | 7.48 |
| QAQTGWVQP | | | | | QAQTGWGQN | | | | |
| QLNGAVHLYA | 299 | 0.776 | 1.609 | 0.09 | PLNGAAHLYA | 798 | 0.451 | 0.467 | 0.09 |
| QAQLGSVQN | | | | | QAQTSPVQN | | | | |
| PLNGAVHLYA | 300 | 0.360 | 1.604 | 40.29 | PLNGAVHLYA | 799 | 0.646 | 0.465 | 0.14 |
| QAQVSAVQN | | | | | QAQTGRVQH | | | | |
| PLNGAVHLYA | 301 | 0.593 | 1.604 | 7.8 | PINGAVHLYA | 800 | 0.768 | 0.464 | 0.09 |
| QAQVLSVQN | | | | | QAQTGWVQS | | | | |
| PLNGAVHLYA | 302 | 0.861 | 1.601 | 5.05 | PLNGAVHLYA | 801 | 0.454 | 0.464 | 2.24 |
| QAQTQHVQN | | | | | QAQTPSVQN | | | | |
| PLNGAVHLYA | 303 | 0.113 | 1.590 | 52.72 | PLNGAVHLYD | 802 | 0.450 | 0.464 | 0.09 |
| QAQLASVQN | | | | | QAQTTAVQN | | | | |
| PLNGAVHLYA | 304 | 0.649 | 1.581 | 8.83 | PLNGNVHLYA | 803 | 0.415 | 0.462 | 0.09 |
| QAQQAPVQN | | | | | QAQTGWVQK | | | | |
| PLNGAVHLYA | 305 | 0.577 | 1.574 | 3.08 | PLNGAVHLYA | 804 | 0.167 | 0.462 | 2.62 |
| QAQNAQVQN | | | | | QAQTGWVEN | | | | |
| PLNGAVHLYA | 306 | 0.760 | 1.567 | 12.81 | PLNGAVNLYA | 805 | 0.371 | 0.461 | 0.19 |
| QAQATPVQN | | | | | QAQTTPVQN | | | | |
| PLNGAVHLYA | 307 | 0.544 | 1.567 | 28.13 | PLNGAVNLYA | 806 | 0.489 | 0.461 | 0.09 |
| QAQVQPVQN | | | | | QAQLSQVQN | | | | |
| PLNGAVHLYA | 308 | 0.537 | 1.563 | 33.13 | SLNGAVHLYA | 807 | 0.263 | 0.460 | 0.14 |
| QAQTTAVQN | | | | | QAQVMSVQN | | | | |
| PLNGAVHLYA | 309 | 0.455 | 1.561 | 3.46 | QLNGAVHLYA | 808 | 0.622 | 0.458 | 0.33 |
| QAQTGWVRN | | | | | QAQTGWVQS | | | | |
| PLNGAVHLYA | 310 | 0.357 | 1.561 | 21.83 | PINGAVHLYA | 809 | 0.534 | 0.457 | 0.19 |
| QAQLAAVQN | | | | | QAQTGWFQN | | | | |
| PLNGAVHLYA | 311 | 0.418 | 1.555 | 0.09 | PLNGDVHLYA | 810 | 0.419 | 0.456 | 0.14 |
| QAQTSPDQN | | | | | QAQVSSVQN | | | | |
| PLNGAVHLYA | 312 | 0.393 | 1.553 | 16.36 | PLNGGVHLYA | 811 | 0.482 | 0.456 | 0.28 |
| QAQRSGVQN | | | | | QAQTGWVQS | | | | |
| PLNGAVHLYA | 313 | 0.218 | 1.551 | 0.65 | PLNGAVNLYA | 812 | 0.559 | 0.456 | 0.09 |
| QAQTGGVQT | | | | | QAQRSTVQN | | | | |
| PLNGAVHLYA | 314 | 0.274 | 1.546 | 0.93 | ALNGAVHLYA | 813 | 0.298 | 0.455 | 0.14 |
| QAQTGWVPN | | | | | QAQTGWVQY | | | | |
| PLDSAVHLYA | 315 | 0.833 | 1.539 | 10.89 | PLNGAVHHYA | 814 | 0.170 | 0.455 | 0.09 |
| QAQTGWVQN | | | | | QAQTAAVQN | | | | |
| PLNGAVHLYA | 316 | 0.496 | 1.537 | 0.09 | PLNGAVHRYA | 815 | 0.346 | 0.454 | 0.09 |
| QAQTTPVQT | | | | | QAQTGWVQH | | | | |
| PLNGAVHLYA | 317 | 0.540 | 1.535 | 7.94 | QLNGAVHLYA | 816 | 0.627 | 0.453 | 0.37 |
| QAQLMAVQN | | | | | QAQTGWVHN | | | | |
| PLNGAVHLYA | 318 | 0.596 | 1.532 | 36.69 | PLNGAVHLYA | 817 | 0.861 | 0.452 | 56.6 |
| QAQTMPVQN | | | | | QAQRGWVQN | | | | |
| PLNGAVHHYA | 319 | 0.391 | 1.529 | 0.09 | PLNGAVHLYA | 818 | 0.233 | 0.450 | 0.14 |
| QAQTSPVQN | | | | | QAQTGSVEN | | | | |
| PLNGAVHLYA | 320 | 0.756 | 1.527 | 7.8 | ALNGAVHLYA | 819 | 0.249 | 0.450 | 0.37 |
| QAQLANVQN | | | | | QAQTGWVHN | | | | |
| PLNGAVHLYA | 321 | 0.606 | 1.520 | 11.68 | PLNGAVNLYA | 820 | 0.494 | 0.449 | 0.09 |
| QAQVSTVQN | | | | | QAQTLAVQN | | | | |
| PLNGAVHLYA | 322 | 0.602 | 1.518 | 12.9 | PLNGAVHLYA | 821 | 0.772 | 0.448 | 91.93 |
| QAQSAQVQN | | | | | QAQSSLVQN | | | | |
| PLNGAVHLYA | 323 | 0.838 | 1.508 | 8.13 | ALNGAVHLYA | 822 | 0.203 | 0.448 | 0.37 |
| QAQNTPVQN | | | | | QAQTGWLQN | | | | |
| PLNGAVHLYA | 324 | 0.381 | 1.495 | 0.09 | TLNGAVHLYA | 823 | 0.736 | 0.448 | 0.09 |
| QAQVSSVQT | | | | | QAQTLQVQN | | | | |
| PLNGAVHLYA | 325 | 0.284 | 1.492 | 0.09 | PLNGAVHLYD | 824 | 0.439 | 0.448 | 0.09 |
| QAQTVSVKN | | | | | QAQVQSVQN | | | | |
| PLNGAVHLYA | 326 | 0.710 | 1.488 | 9.21 | SLNGAVHLYA | 825 | 0.442 | 0.447 | 0.09 |
| QPQTGLVQN | | | | | QAQVTGVQN | | | | |
| PLNGAVHLYA | 327 | 0.287 | 1.487 | 621.2 | QLNGAVHLYA | 826 | 0.849 | 0.444 | 0.09 |
| QAQTGSVQN | | | | | QAQSAVVQN | | | | |
| SLNGAVHLYA | 328 | 0.437 | 1.485 | 0.09 | PLNGVVHLYA | 827 | 0.410 | 0.444 | 0.09 |
| QAQTLPVQN | | | | | QAQTGWVQT | | | | |
| PLNGAVHLYA | 329 | 0.440 | 1.478 | 0.09 | PLNGAVHLYA | 828 | 0.373 | 0.444 | 0.61 |
| QAQTGGAQN | | | | | QAQTAWVKN | | | | |
| SLNGAVHLYA | 330 | 0.618 | 1.477 | 0.09 | TLNGAVHLYA | 829 | 0.557 | 0.443 | 0.14 |
| QAQTAQVQN | | | | | QAQTLPVQN | | | | |
| PLNGAVHLYA | 331 | 0.684 | 1.466 | 14.21 | ALNGAVHLYA | 830 | 0.683 | 0.442 | 0.09 |
| QAQTAVVQN | | | | | QAQTTGVQN | | | | |
| PLNGAVHLYA | 332 | 0.533 | 1.456 | 17.71 | PLNGAVHLYA | 831 | 0.466 | 0.442 | 0.09 |
| QAQRLGVQN | | | | | KAQTMAVQN | | | | |
| PLNGSVHLYA | 333 | 0.207 | 1.453 | 0.37 | PLNGAVHLYA | 832 | 0.636 | 0.442 | 10.61 |
| QAQTGWVQH | | | | | QAQTYSVQN | | | | |
| PLNGAVHLYA | 334 | 0.489 | 1.452 | 21.26 | PLNGCVHLYA | 833 | 0.285 | 0.441 | 0.75 |
| QAQRTLVQN | | | | | QAQTGWVQN | | | | |
| SLNGAVHLYA | 335 | 0.559 | 1.451 | 0.09 | PLNGAVHLYA | 834 | 0.491 | 0.440 | 0.09 |
| QAQTMAVQN | | | | | QAQLAAVQT | | | | |
| PLNGAVHLYA | 336 | 0.707 | 1.447 | 10.23 | PLNGAVHLYA | 835 | 0.734 | 0.440 | 0.14 |
| QAQTQMVQN | | | | | QAQTALVKN | | | | |
| PLNGAVHLYA | 337 | 0.663 | 1.442 | 10.52 | PLNGAVHLYA | 836 | 0.392 | 0.439 | 0.14 |
| QAQITPVQN | | | | | KAQTVAVQN | | | | |
| PLNGAVHLYA | 338 | 0.199 | 1.434 | 0.09 | PLNGAVHLYA | 837 | 0.225 | 0.439 | 0.37 |
| QAQTVWVQK | | | | | HAQTGWVQT | | | | |
| PLNGAVHLYA | 339 | 0.584 | 1.423 | 13.97 | PLNGGVHLYA | 838 | 0.649 | 0.439 | 0.09 |
| QAQRSAVQN | | | | | QAQRGSVQN | | | | |
| PLNGAVHLYA | 340 | 0.332 | 1.420 | 99.87 | PLNGAFHLYA | 839 | 0.462 | 0.436 | 0.14 |
| QAQTASVQN | | | | | QAQTGGVQN | | | | |
| PLNGAVHLYA | 341 | 0.536 | 1.417 | 11.22 | PLNGAVHLYA | 840 | 0.496 | 0.436 | 0.09 |
| QAQTMGVQN | | | | | LAQTSPVQN | | | | |
| PLNGAVHLYA | 342 | 0.256 | 1.414 | 0.28 | PLNGAVHLYA | 841 | 0.225 | 0.435 | 2.9 |
| QAQTGGVQH | | | | | QAQTGWVQY | | | | |
| PLNGAVHLYA | 343 | 0.415 | 1.412 | 36.36 | PLNGAVHLYA | 842 | 0.538 | 0.432 | 0.19 |
| QAQVQSVQN | | | | | QAQTLPVQT | | | | |
| PLNGAVHLYA | 344 | 0.324 | 1.411 | 500.1 | PLNGAVHLYS | 843 | 0.499 | 0.432 | 0.23 |
| QAQTGGVQN | | | | | QAQTGWFQN | | | | |
| SLNGAVHLYA | 345 | 0.471 | 1.411 | 0.09 | PLNGAVHLYA | 844 | 0.696 | 0.432 | 0.33 |
| QAQTAPVQN | | | | | QAQTGLVQH | | | | |
| PLNGAVHLYA | 346 | 0.680 | 1.410 | 16.68 | PLNGAVHLYA | 845 | 0.628 | 0.432 | 0.98 |
| QAQISPVQN | | | | | QAQTPTVQN | | | | |
| PLNGAVHLYA | 347 | 0.345 | 1.409 | 0.09 | PLYGAVHLYA | 846 | 0.274 | 0.429 | 0.28 |
| QPQTGWVKN | | | | | QAQTAWVQN | | | | |
| PLNGAVHLYA | 348 | 0.242 | 1.409 | 0.14 | PLNGAVHLYA | 847 | 0.275 | 0.428 | 0.23 |
| QAQTGSAQN | | | | | KAQTASVQN | | | | |
| PLNGAVHLYA | 349 | 0.474 | 1.393 | 2.62 | PLNGAVHLYA | 848 | 0.285 | 0.428 | 0.19 |
| QAQTGWAQN | | | | | QAQTASVQK | | | | |
| PLNGAVHLYA | 350 | 0.383 | 1.392 | 0.09 | PLDGSVHLYA | 849 | 0.641 | 0.424 | 0.09 |
| QAQTMSVQT | | | | | QAQTAWVQN | | | | |
| PLNGSVHLYA | 351 | 0.649 | 1.391 | 12.29 | PLNGADHLYA | 850 | 0.540 | 0.423 | 0.09 |
| QAQTAWVQN | | | | | QAQTSSVQN | | | | |
| PLNGAVHLYA | 352 | 0.410 | 1.387 | 8.13 | PLNGAVHLYA | 851 | 0.594 | 0.422 | 0.09 |
| QAQVGGVQN | | | | | QAQTSPVQI | | | | |
| PLNGAVHLYA | 353 | 0.496 | 1.387 | 0.09 | PLNGAVHLYA | 852 | 0.661 | 0.420 | 40 |
| KAQTSPVQN | | | | | QAQIGWVQN | | | | |
| PLNGAVHLYA | 354 | 0.768 | 1.381 | 0.09 | PLNGAVHLYA | 853 | 0.209 | 0.419 | 0.09 |
| QAQLAPVQT | | | | | KAQTSTVQN | | | | |
| PLDGAVHLYA | 355 | 0.901 | 1.375 | 0.09 | PLNGAVHRYA | 854 | 0.237 | 0.419 | 0.19 |
| QAQTALVQN | | | | | QAQTGWVQT | | | | |
| PLNGAVHLYA | 356 | 0.594 | 1.368 | 58.98 | PLNGAVHLYD | 855 | 0.268 | 0.419 | 0.14 |
| QAQTALVQN | | | | | QAQTSTVQN | | | | |
| PLNGAVHLYA | 357 | 0.470 | 1.366 | 19.63 | QLNGAVHLYA | 856 | 0.568 | 0.418 | 69.31 |
| QAQLAGVQN | | | | | QAQTGLVQN | | | | |
| PLNGAVHLYA | 358 | 0.613 | 1.365 | 9.53 | PLNGAVNLYA | 857 | 0.864 | 0.417 | 0.09 |
| QAQRTAVQN | | | | | QAQLGPVQN | | | | |
| PLNGAVHLYA | 359 | 0.540 | 1.363 | 22.15 | PLNGAVHLYA | 858 | 0.400 | 0.417 | 0.23 |
| QAQRSPVQN | | | | | QAQTGWDKN | | | | |
| PLNGAVHLYA | 360 | 0.513 | 1.360 | 39.82 | PLNGALHLYA | 859 | 0.432 | 0.416 | 0.14 |
| QAQTLAVQN | | | | | QAQTGWVKN | | | | |
| PLNGAVHLYA | 361 | 0.322 | 1.351 | 5.42 | PLNGNVHLYA | 860 | 0.698 | 0.414 | 0.09 |
| QAQLAHVQN | | | | | HAQTGWVQN | | | | |
| PLNGAVHLYA | 362 | 0.352 | 1.348 | 36.69 | PLNGAVHLYA | 861 | 0.861 | 0.414 | 8.23 |
| QAQTSLVQN | | | | | QAQKSSVQN | | | | |
| PLNGAVHLYA | 363 | 0.548 | 1.347 | 30.75 | PLNGAVHLYA | 862 | 0.691 | 0.412 | 30.7 |
| QAQRLSVQN | | | | | QAQTGYVQN | | | | |
| PLNGAVHLYD | 364 | 0.406 | 1.344 | 0.09 | PVNGAVHLYA | 863 | 0.456 | 0.412 | 0.09 |
| QAQLSPVQN | | | | | QAQVGSVQN | | | | |
| PLNGAVHLYA | 365 | 0.424 | 1.339 | 13.97 | PLNGGVHLYA | 864 | 0.536 | 0.411 | 1.17 |
| QAQLMGVQN | | | | | QAQTGWVKN | | | | |
| PLNGSVHLYA | 366 | 0.147 | 1.336 | 1.03 | PLNGAVHLYA | 865 | 0.627 | 0.410 | 0.09 |
| QAQTGWVQT | | | | | QAQRGWVQT | | | | |
| PLNGAVHLYA | 367 | 0.588 | 1.335 | 11.26 | PLNGAVNLYA | 866 | 0.729 | 0.410 | 0.09 |
| QAQSMQVQN | | | | | QAQRSLVQN | | | | |
| PLNGGVHLYA | 368 | 0.483 | 1.334 | 0.14 | PINGAVHLYA | 867 | 0.358 | 0.410 | 0.51 |
| QAQTGWFQN | | | | | QAQTGWDQN | | | | |
| PLNGAVHLYA | 369 | 0.834 | 1.326 | 14.02 | PLNGNVHLYA | 868 | 0.536 | 0.410 | 0.23 |
| QAQTQTVQN | | | | | QAQTGWVQT | | | | |
| PLDGAVHLYS | 370 | 0.860 | 1.323 | 9.44 | PLNGAVHLYA | 869 | 0.265 | 0.409 | 0.23 |
| QAQTGWVQN | | | | | KAQTGWFQN | | | | |
| PLNGAVHLYA | 371 | 0.325 | 1.319 | 0.14 | PLNGAVHLYA | 870 | 0.421 | 0.408 | 0.09 |
| QAQTGWEQN | | | | | QEQTSTVQN | | | | |
| PLNGAVHLYA | 372 | 0.487 | 1.317 | 29.44 | PLNGAVHLYA | 871 | 0.281 | 0.406 | 0.14 |
| QAQVGSVQN | | | | | QAQTGGVEN | | | | |
| PLNGAVHLYA | 373 | 0.339 | 1.317 | 24.86 | PLNGAVHLYS | 872 | 0.831 | 0.406 | 0.09 |
| QAQVSGVQN | | | | | QAQTGWVQI | | | | |
| PLNGAVHLYA | 374 | 0.767 | 1.312 | 13.04 | SLNGAVHLYA | 873 | 0.480 | 0.406 | 0.09 |
| QAQVMAVQN | | | | | QAQTGLVQK | | | | |
| PLNGAVHLYA | 375 | 0.814 | 1.309 | 23.37 | PLNGAVHLYA | 874 | 0.605 | 0.403 | 0.09 |
| QAQIGGVQN | | | | | QAQTGCVRN | | | | |
| PLNGAVHLYA | 376 | 0.841 | 1.301 | 5.47 | PLNGADHLYA | 875 | 0.758 | 0.402 | 0.09 |
| QAQIAGVQN | | | | | QAQVTPVQN | | | | |
| PLNGAVHLYA | 377 | 0.200 | 1.297 | 0.09 | PLNGAVHLYA | 876 | 0.129 | 0.400 | 0.28 |
| KAQTVSVQN | | | | | PAQTGWVQT | | | | |
| PLNGAVHLYS | 378 | 0.838 | 1.297 | 4.3 | PLNGDVHLYA | 877 | 0.900 | 0.400 | 0.09 |
| QAQTGRVQN | | | | | QAQTSAVQN | | | | |
| PLNGAVHLYA | 379 | 0.826 | 1.296 | 7.34 | TLNGAVHLYA | 878 | 0.635 | 0.399 | 0.09 |
| QAQLSHVQN | | | | | QAQSSLVQN | | | | |
| PLNGAVHLYA | 380 | 0.865 | 1.288 | 4.77 | SLNGAVHLYA | 879 | 0.645 | 0.399 | 0.14 |
| QAQVQTVQN | | | | | QAQRSVVQN | | | | |
| SLDGAVHLYA | 381 | 0.875 | 1.287 | 61.08 | SLNGAVHLYA | 880 | 0.817 | 0.397 | 0.33 |
| QAQTGWVQN | | | | | QAQTGWVQS | | | | |
| PLNGAVHLYA | 382 | 0.326 | 1.287 | 0.09 | PVNGAVHLYA | 881 | 0.800 | 0.397 | 0.14 |
| QPQTGWDQN | | | | | QAQTGWVQS | | | | |
| PLNGAVHLYA | 383 | 0.564 | 1.284 | 11.36 | PLNGAVHLYA | 882 | 0.619 | 0.396 | 0.09 |
| QAQRNSVQN | | | | | QAQLSPVQS | | | | |
| PLNGAVHLYA | 384 | 0.533 | 1.283 | 57.16 | PLNGAVHLYA | 883 | 0.285 | 0.395 | 0.09 |
| QAQTLPVQN | | | | | QPQTGWLQN | | | | |
| PLNGAVHLYA | 385 | 0.569 | 1.282 | 5.09 | PLNGAVNLYA | 884 | 0.719 | 0.394 | 0.14 |
| QAQTKQVQN | | | | | QAQSAPVQN | | | | |
| PLNGSVHLYA | 386 | 0.144 | 1.279 | 972 | PLNGTVHLYA | 885 | 0.384 | 0.394 | 0.09 |
| QAQTGWVQN | | | | | QAQTGWVPN | | | | |
| PLNGAVHLYA | 387 | 0.593 | 1.278 | 11.17 | PVDGAVHLYA | 886 | 0.792 | 0.394 | 0.23 |
| QAQLGQVQN | | | | | QAQTGSVQN | | | | |
| SLNGAVHLYA | 388 | 0.684 | 1.277 | 19.35 | PLNGAVHLYD | 887 | 0.261 | 0.393 | 0.09 |
| QAQTGRVQN | | | | | QAQTAAVQN | | | | |
| PLDGAVHLYA | 389 | 0.647 | 1.275 | 263.1 | PLKGAVHLYA | 888 | 0.352 | 0.392 | 0.09 |
| QAQTGWVQN | | | | | QAQTSTVQN | | | | |
| PLNGSVHLYA | 390 | 0.181 | 1.273 | 0.19 | PLNGAVHLYA | 889 | 0.730 | 0.392 | 0.14 |
| QAQTGWAQN | | | | | QAQTGPVQT | | | | |
| TLNGAVHLYA | 391 | 0.405 | 1.266 | 0.09 | PLNGAVHLYA | 890 | 0.432 | 0.392 | 0.14 |
| QAQVASVQN | | | | | QAQTVGVQK | | | | |
| PLNGAVHLYA | 392 | 0.733 | 1.261 | 2.85 | PLNGAVNLYA | 891 | 0.451 | 0.391 | 0.14 |
| QAQNMQVQN | | | | | QAQTSTVQN | | | | |
| PLNGAVHLYA | 393 | 0.863 | 1.258 | 3.18 | PLNGAVHLYA | 892 | 0.414 | 0.390 | 0.09 |
| QAQNVQVQN | | | | | RAQTVSVQN | | | | |
| PLNGAVHLYA | 394 | 0.299 | 1.250 | 0.14 | PLNGAVHLYA | 893 | 0.431 | 0.390 | 0.09 |
| QAQTGSVQI | | | | | QAQTASGQN | | | | |
| PLNGTVHLYA | 395 | 0.840 | 1.249 | 15.75 | PLNGAVHLYA | 894 | 0.631 | 0.390 | 20.28 |
| QAQTGGVQN | | | | | QAQSVSVQN | | | | |
| PLNGAVHLYA | 396 | 0.805 | 1.248 | 0.09 | PLNGAVHLYA | 895 | 0.724 | 0.389 | 0.09 |
| KAQVSPVQN | | | | | QAQSGPVQT | | | | |
| PLNGAVHLYA | 397 | 0.765 | 1.241 | 6.4 | QLNGAVHLYA | 896 | 0.578 | 0.389 | 0.47 |
| QAQRGGVQN | | | | | QAQTGWGQN | | | | |
| PLNGGVHLYA | 398 | 0.335 | 1.240 | 25.94 | PLNGAVHLYA | 897 | 0.670 | 0.386 | 0.09 |
| QAQTGLVQN | | | | | QAQVMSVKN | | | | |
| PLNGAVHLYA | 399 | 0.542 | 1.237 | 33.32 | PLNGTVHLYA | 898 | 0.557 | 0.386 | 0.09 |
| QAQVMSVQN | | | | | KAQTGSVQN | | | | |
| PLNGAVHLYA | 400 | 0.401 | 1.235 | 15.05 | PLNGAVNLYA | 899 | 0.527 | 0.385 | 0.09 |
| QAQTTGVQN | | | | | QAQTSLVQN | | | | |
| PLNGAVHLYA | 401 | 0.375 | 1.229 | 0.09 | PINGAVHLYA | 900 | 0.867 | 0.385 | 0.14 |
| QAQLSPVQK | | | | | QAQTLSVQN | | | | |
| SLNGAVHLYA | 402 | 0.677 | 1.226 | 0.09 | PLNGAVHLYA | 901 | 0.458 | 0.384 | 0.09 |
| QAQTAAVQN | | | | | QAQLGSVQK | | | | |
| PINGAVHLYA | 403 | 0.351 | 1.223 | 0.14 | TLNGAVHLYA | 902 | 0.728 | 0.383 | 0.09 |
| QAQTSPVQN | | | | | QAQTAMVQN | | | | |
| PLNGAVHLYA | 404 | 0.691 | 1.220 | 15.28 | PLNGAVHLYA | 903 | 0.775 | 0.383 | 0.09 |
| QAQLSRVQN | | | | | QAHLSSVQN | | | | |
| PLNGAVHLYA | 405 | 0.259 | 1.213 | 0.09 | PLNGAVHLYA | 904 | 0.552 | 0.380 | 0.09 |
| QAQVSSVQK | | | | | KAQVMSVQN | | | | |
| PLNGAVHLYA | 406 | 0.768 | 1.212 | 0.09 | PLNGAVHLYA | 905 | 0.569 | 0.380 | 0.09 |
| QAQTAPVQT | | | | | QAQTGLVLN | | | | |
| PLNGAVHLYA | 407 | 0.740 | 1.206 | 7.9 | PLNGGVHLYA | 906 | 0.491 | 0.378 | 1.03 |
| QAQMAPVQN | | | | | QAQTGWVQK | | | | |
| PLNGAVHLYA | 408 | 0.499 | 1.202 | 7.06 | PLNGAVHLYA | 907 | 0.250 | 0.378 | 0.61 |
| QAQILGVQN | | | | | KAQTGWVQK | | | | |
| PLNGAVHLYA | 409 | 0.216 | 1.198 | 0.14 | PLNGAVLLYA | 908 | 0.482 | 0.378 | 0.09 |
| QAQTASVQT | | | | | QAQTASVQN | | | | |
| PLNGAVHLYA | 410 | 0.267 | 1.196 | 0.23 | PLNGDVHLYA | 909 | 0.507 | 0.378 | 0.09 |
| QAQTGSLQN | | | | | QAQTMAVQN | | | | |
| PLNGAVHLYA | 411 | 0.638 | 1.196 | 28.79 | PLNGAVHLYA | 910 | 0.258 | 0.377 | 0.09 |
| QAQTGTVQN | | | | | KAQTAAVQN | | | | |
| PLNGGVHLYA | 412 | 0.578 | 1.193 | 565.1 | PLNGAVHLYA | 911 | 0.549 | 0.377 | 763.5 |
| QAQTGWVQN | | | | | QAQTGLVQN | | | | |
| PLNGAVHLYA | 413 | 0.237 | 1.183 | 0.89 | PLNGDVHLYA | 912 | 0.699 | 0.376 | 0.14 |
| QAQTGSVQT | | | | | QAQSSPVQN | | | | |
| PLNGAVHLYA | 414 | 0.353 | 1.171 | 0.09 | PLNGAVHLYA | 913 | 0.832 | 0.376 | 14.96 |
| QAQTSSVQT | | | | | QAQTSNVQN | | | | |
| PLNGAVHLYA | 415 | 0.414 | 1.167 | 10.84 | ALDGAVHLYA | 914 | 0.702 | 0.376 | 0.47 |
| QAQTSHVQN | | | | | QAQTGSVQN | | | | |
| PLNGGVHLYA | 416 | 0.561 | 1.166 | 0.28 | PLNGAVHLYS | 915 | 0.848 | 0.375 | 0.09 |
| QAQTGWDQN | | | | | QAQTSSVQN | | | | |
| PLNGAVHLYA | 417 | 0.753 | 1.165 | 3.55 | PLKGAVHLYA | 916 | 0.390 | 0.373 | 0.19 |
| QAQRIGVQN | | | | | QAQLSPVQN | | | | |
| TLNGAVHLYA | 418 | 0.771 | 1.164 | 0.09 | LLNGAVHLYA | 917 | 0.349 | 0.373 | 0.09 |
| QAQTTSVQN | | | | | QAQTVSVQN | | | | |
| PLNGAVHLYA | 419 | 0.347 | 1.158 | 0.14 | PLNGGVHLYA | 918 | 0.571 | 0.373 | 0.37 |
| QAQTGWGQT | | | | | QAQTGWVQI | | | | |
| PLNGAVHLYA | 420 | 0.549 | 1.158 | 14.3 | PLNGAVHLYS | 919 | 0.863 | 0.372 | 0.14 |
| QAQSAMVQN | | | | | QAQTGWVRN | | | | |
| PLNGAVHLYA | 421 | 0.510 | 1.156 | 23.23 | PLNGAVHLYA | 920 | 0.426 | 0.371 | 0.09 |
| QAQTSMVQN | | | | | QAQTGWGHN | | | | |
| PLNGAVHLYA | 422 | 0.781 | 1.148 | 13.09 | PHNGAVHLYA | 921 | 0.849 | 0.371 | 0.09 |
| QAQSMGVQN | | | | | QAQTTSVQN | | | | |
| PLNGAVHLYA | 423 | 0.568 | 1.145 | 27.62 | PLNRAVHLYA | 922 | 0.436 | 0.371 | 0.09 |
| QAQSMSVQN | | | | | QAQTGWVQK | | | | |
| PLNGAVHLYA | 424 | 0.442 | 1.145 | 94.03 | PLNGAVHLYD | 923 | 0.509 | 0.371 | 0.09 |
| QAQTSSVQN | | | | | QAQRASVQN | | | | |
| PLNGAVHLYA | 425 | 0.620 | 1.143 | 30.52 | PLNGAVHLYS | 924 | 0.800 | 0.370 | 584.7 |
| QAQTSGVQN | | | | | QAQTGWVQN | | | | |
| PLNGAVHLYA | 426 | 0.557 | 1.141 | 22.9 | PLNGSVHLYA | 925 | 0.401 | 0.370 | 0.42 |
| QAQTGAVQN | | | | | QAQTGTVQN | | | | |
| PLNGAVHLYA | 427 | 0.627 | 1.140 | 14.02 | PLNGAVHLYD | 926 | 0.752 | 0.370 | 0.09 |
| QAQVNSVQN | | | | | QAQTSGVQN | | | | |
| PLNGAVHLYA | 428 | 0.804 | 1.139 | 12.48 | PLNGAVHLYA | 927 | 0.389 | 0.368 | 0.19 |
| QAQVAGVQN | | | | | QAKTGWFQN | | | | |
| PLNGAVHLYA | 429 | 0.710 | 1.139 | 27.01 | KLDGAVHLYA | 928 | 0.763 | 0.367 | 0.14 |
| QAQIGSVQN | | | | | QAQTGLVQN | | | | |
| PLDGAVHVYA | 430 | 0.818 | 1.132 | 9.49 | PLNGAVHLYA | 929 | 0.581 | 0.363 | 9.39 |
| QAQTGWVQN | | | | | QAQSQMVQN | | | | |
| TLNGAVHLYA | 431 | 0.474 | 1.131 | 0.09 | TLNGAVHLYA | 930 | 0.706 | 0.363 | 0.09 |
| QAQTTPVQN | | | | | QAQTSVVQN | | | | |
| PLNGAVHLYA | 432 | 0.442 | 1.131 | 41.64 | PLNGAVHLYA | 931 | 0.449 | 0.361 | 0.09 |
| QAQLGSVQN | | | | | KAQTGTVQN | | | | |
| PLNGAVHLYA | 433 | 0.807 | 1.130 | 7.06 | PLNGAVHLYA | 932 | 0.440 | 0.361 | 0.09 |
| QAQVNGVQN | | | | | QAQTVSVHN | | | | |
| QLNGAVHLYA | 434 | 0.857 | 1.127 | 0.19 | PLNGAVHLYA | 933 | 0.559 | 0.361 | 0.19 |
| QAQLSSVQN | | | | | QAQLSSVQT | | | | |
| PLNGAVHLYA | 435 | 0.652 | 1.127 | 7.62 | PVNGAVHLYA | 934 | 0.791 | 0.359 | 0.28 |
| QAQLTAVQN | | | | | QAQTGWFQN | | | | |
| PLNGAVHLYA | 436 | 0.892 | 1.125 | 3.22 | PLNGAVHLYA | 935 | 0.266 | 0.356 | 0.09 |
| QAQVQNVQN | | | | | QAQTASVRN | | | | |
| PLNGAVHLYA | 437 | 0.737 | 1.117 | 14.63 | PLNGDVHLYA | 936 | 0.410 | 0.355 | 0.09 |
| QAQTKSVQN | | | | | QAQTSTVQN | | | | |
| PLNGAVHLYA | 438 | 0.847 | 1.117 | 16.64 | PLNGAVHLYA | 937 | 0.477 | 0.354 | 0.09 |
| QAQSVGVQN | | | | | KAQLGSVQN | | | | |
| QLNGAVHLYA | 439 | 0.413 | 1.116 | 0.09 | PINGAVHLYA | 938 | 0.774 | 0.354 | 0.09 |
| QAQLGPVQN | | | | | QAQLVPVQN | | | | |
| PLNGAVHLYA | 440 | 0.274 | 1.107 | 0.47 | PLNGAVHHYA | 939 | 0.833 | 0.354 | 0.09 |
| QAQTAWVQT | | | | | QAQLGPVQN | | | | |
| PLNGAVHLYA | 441 | 0.651 | 1.099 | 11.54 | PLNGAVHLYA | 940 | 0.387 | 0.353 | 0.19 |
| QAQNASVQN | | | | | PAQTGWVQH | | | | |
| PLNGAVHLYA | 442 | 0.661 | 1.098 | 45.57 | PLNGAVHLYA | 941 | 0.696 | 0.353 | 0.56 |
| QAQTSAVQN | | | | | QAQVPAVQN | | | | |
| ALNGAVHLYA | 443 | 0.530 | 1.097 | 0.09 | PLNGAVNLYA | 942 | 0.774 | 0.353 | 0.09 |
| QAQLAAVQN | | | | | QAQRLSVQN | | | | |
| PLNGAVHLYD | 444 | 0.721 | 1.097 | 0.09 | PLNGAVHLYA | 943 | 0.534 | 0.352 | 0.23 |
| QAQVSPVQN | | | | | QAQTGRVQK | | | | |
| PLNGAVHLYA | 445 | 0.442 | 1.095 | 0.09 | PLNGAVLLYA | 944 | 0.370 | 0.352 | 0.09 |
| QAQTMSVKN | | | | | QAQTVSVQN | | | | |
| PLNGAVHLYA | 446 | 0.650 | 1.092 | 7.71 | PLNGAVHLYA | 945 | 0.510 | 0.351 | 11.4 |
| QAQTANVQN | | | | | QAQAMSVQN | | | | |
| PLNGAVHLYA | 447 | 0.358 | 1.092 | 5.19 | PLNGAVHLYA | 946 | 0.451 | 0.351 | 0.23 |
| QAQTGWFQN | | | | | QAQTAWVHN | | | | |
| PLNGNVHLYA | 448 | 0.392 | 1.090 | 74.03 | PLNGAVHLYA | 947 | 0.615 | 0.350 | 0.09 |
| QAQTGWVQN | | | | | QPQTGWVRN | | | | |
| PLNGSVHLYA | 449 | 0.195 | 1.087 | 0.23 | PLNGAVHLYA | 948 | 0.548 | 0.350 | 0.09 |
| QAQTGWVQS | | | | | QEQTGWLQN | | | | |
| PLNGAVHLYA | 450 | 0.279 | 1.081 | 0.09 | PLNGAVHLYA | 949 | 0.535 | 0.348 | 0.09 |
| QAQTGGVLN | | | | | KAQTSAVQN | | | | |
| PLNGAVHLYA | 451 | 0.888 | 1.081 | 16.45 | PLNGSVHLYA | 950 | 0.126 | 0.348 | 0.98 |
| QAQLTSVQN | | | | | QAQTVWVQN | | | | |
| PLNGAVHLYA | 452 | 0.176 | 1.079 | 19.3 | PLNGTVHLYA | 951 | 0.330 | 0.347 | 0.33 |
| QAQTGWVQT | | | | | QAQTGWFQN | | | | |
| PLNGAVHLYA | 453 | 0.804 | 1.078 | 10. | PLNGAVNLYA | 952 | 0.375 | 0.347 | 0.23 |
| QAQRSQVQN | | | | | QAQVASVQN | | | | |
| PLNGAVHIYA | 454 | 0.840 | 1.074 | 0.09 | PLNGAVHLYA | 953 | 0.674 | 0.347 | 0.19 |
| QAQVSPVQN | | | | | QAQTGLVRN | | | | |
| PLNGSVHLYA | 455 | 0.130 | 1.062 | 0.37 | PLNGAVNLYA | 954 | 0.587 | 0.346 | 0.09 |
| QAQTGWFQN | | | | | QAQLSTVQN | | | | |
| PLNGAVHLYA | 456 | 0.863 | 1.060 | 3.13 | PLNGAVHLYA | 955 | 0.721 | 0.346 | 0.09 |
| QAQRIPVQN | | | | | KAQTQPVQN | | | | |
| QLNGAVHLYA | 457 | 0.718 | 1.054 | 0.09 | PLNGTVHLYA | 956 | 0.382 | 0.346 | 0.33 |
| QAQLVPVQN | | | | | QAQTGWGQN | | | | |
| PLNGAVHLYA | 458 | 0.198 | 1.052 | 2.06 | PLNGAVHLYA | 957 | 0.453 | 0.345 | 0.09 |
| QAQTGWVQD | | | | | QAQRTLVQT | | | | |
| PLNGAVHLYA | 459 | 0.357 | 1.051 | 0.09 | PLNGAVHLYA | 958 | 0.157 | 0.345 | 0.61 |
| KAQVSSVQN | | | | | QAQTGSIQN | | | | |
| PLNGAVHLYA | 460 | 0.721 | 1.051 | 11.54 | QLNGAVHLYA | 959 | 0.574 | 0.344 | 1.4 |
| QAQRVEVQN | | | | | QAQTGWDQN | | | | |
| PLNGAVHLYA | 461 | 0.553 | 1.048 | 56.6 | PLNGAVHLYA | 960 | 0.599 | 0.344 | 0.14 |
| QAQVLPVQN | | | | | QAQLSSVKN | | | | |
| PLNGSVHLYA | 462 | 0.194 | 1.044 | 0.28 | QLNGAVHLYA | 961 | 0.451 | 0.343 | 1.45 |
| QAQTGWVRN | | | | | QAQTVSVQN | | | | |
| PLNGTVHLYA | 463 | 0.648 | 1.040 | 0.09 | PLNGAVHLYA | 962 | 0.726 | 0.343 | 0.09 |
| QAQSSPVQN | | | | | QAQTLQVQK | | | | |
| PLNGAVHLYA | 464 | 0.301 | 1.039 | 0.42 | TLNGAVHLYA | 963 | 0.573 | 0.343 | 0.14 |
| QAQTGGVQK | | | | | QAQVLPVQN | | | | |
| PLNGAVHLYA | 465 | 0.727 | 1.039 | 14.63 | PLNGAVHLYA | 964 | 0.756 | 0.342 | 0.09 |
| QAQSVAVQN | | | | | QAQVGSVKN | | | | |
| QLNGAVHLYA | 466 | 0.815 | 1.030 | 0.09 | PLNGAVHLYA | 965 | 0.744 | 0.341 | 0.09 |
| QAQLSGVQN | | | | | QAQLAPLQN | | | | |
| PLNGAVHLYA | 467 | 0.384 | 1.026 | 11.26 | QLNGAVHLYA | 966 | 0.716 | 0.341 | 0.09 |
| QAQLQQVQN | | | | | QAQTGSVKN | | | | |
| PLNGAVHLYA | 468 | 0.547 | 1.025 | 32.06 | PLNGAVHHYA | 967 | 0.620 | 0.341 | 0.09 |
| QAQLSTVQN | | | | | QAQRSTVQN | | | | |
| PLNGAVHLYA | 469 | 0.813 | 1.025 | 18.09 | QLNGSVHLYA | 968 | 0.266 | 0.341 | 0.23 |
| QAQSAAVQN | | | | | QAQTGRVQN | | | | |
| SLNGAVHLYA | 470 | 0.774 | 1.014 | 0.14 | TLNGAVHLYA | 969 | 0.818 | 0.340 | 0.09 |
| QAQVSAVQN | | | | | QAQVKPVQN | | | | |
| PLNGAVHLYA | 471 | 0.432 | 1.013 | 20.47 | PLNGTVHLYA | 970 | 0.784 | 0.339 | 24.58 |
| QAQRTSVQN | | | | | QAQTGLVQN | | | | |
| PLNGAVHLYA | 472 | 0.877 | 1.012 | 5.47 | PLNGAVHLYA | 971 | 0.396 | 0.338 | 0.65 |
| QAQTQNVQN | | | | | QAQTPGVQN | | | | |
| PLNGAVHLYA | 473 | 0.877 | 1.007 | 4.81 | PINGAVHLYA | 972 | 0.713 | 0.338 | 0.28 |
| QAQVNAVQN | | | | | QAQTSSVQN | | | | |
| PLNGAVHLYA | 474 | 0.585 | 1.006 | 0.09 | PLNGAVHLYA | 973 | 0.428 | 0.337 | 0.09 |
| QAQTVAVQT | | | | | QAQLSAVQT | | | | |
| PLNGAVHLYA | 475 | 0.487 | 1.005 | 20.75 | PLNGAVHLYS | 974 | 0.446 | 0.337 | 0.47 |
| QAQLMSVQN | | | | | QAQTGWDQN | | | | |
| PLNGAVHLYA | 476 | 0.179 | 1.000 | 15655 | PLNCAVHLYA | 975 | 0.856 | 0.336 | 14.39 |
| QAQTGWVQN | | | | | QAQTGWVQN | | | | |
| PLNGAVHLYA | 477 | 0.354 | 0.999 | 0.09 | PLNGAVNLYA | 976 | 0.624 | 0.336 | 0.14 |
| HAQTGWVQH | | | | | QAQTMPVQN | | | | |
| PLNGAVHLYA | 478 | 0.283 | 0.997 | 7.48 | PLNGAVHLYS | 977 | 0.283 | 0.335 | 0.09 |
| QAQTGWVQH | | | | | QAQTVAVQN | | | | |
| PLNGAVHHYA | 479 | 0.408 | 0.993 | 0.09 | PLNGTVHLYA | 978 | 0.366 | 0.334 | 0.79 |
| QAQTMSVQN | | | | | QAQTGWVKN | | | | |
| PLNGAVHLYA | 480 | 0.228 | 0.978 | 3.08 | PLNGGVHLYA | 979 | 0.465 | 0.333 | 0.37 |
| QAQTGWVQS | | | | | QAQTGWVHN | | | | |
| PLNGAVHLYD | 481 | 0.409 | 0.976 | 0.09 | QLNGAVHLYA | 980 | 0.558 | 0.332 | 1.59 |
| QAQTTPVQN | | | | | QAQTGWVQK | | | | |
| PLNGAVHLYA | 482 | 0.837 | 0.973 | 3.69 | PLNGAVQLYA | 981 | 0.524 | 0.331 | 0.09 |
| QAQTMMVQN | | | | | QAQTLAVQN | | | | |
| PLNGAVHLYA | 483 | 0.293 | 0.971 | 0.14 | PLNGTVHLYA | 982 | 0.695 | 0.331 | 0.09 |
| QAQTGGVQS | | | | | QAQVGSVQN | | | | |
| PLNGAVNLYA | 484 | 0.499 | 0.969 | 0.14 | PLNGGVHLYA | 983 | 0.764 | 0.330 | 17.67 |
| QAQTSPVQN | | | | | QAQTGGVQN | | | | |
| ALNGAVHLYA | 485 | 0.322 | 0.968 | 47.95 | PLKGAVHLYA | 984 | 0.474 | 0.330 | 0.09 |
| QAQTGLVQN | | | | | QAQVSQVQN | | | | |
| ALNGAVHLYA | 486 | 0.247 | 0.964 | 0.09 | PLNGAVHHYA | 985 | 0.526 | 0.330 | 0.09 |
| QAQVATVQN | | | | | QAQTQPVQN | | | | |
| PLNGAVHLYA | 487 | 0.258 | 0.959 | 0.23 | PLNGAVHLYA | 986 | 0.156 | 0.329 | 0.33 |
| QAQTGSFQN | | | | | QAPTGWVQT | | | | |
| PLNGAVHLYA | 488 | 0.422 | 0.958 | 27.01 | PLNGAVNLYA | 987 | 0.343 | 0.329 | 0.33 |
| QAQRSVVQN | | | | | QAQTMSVQN | | | | |
| PLNGAVHLYA | 489 | 0.224 | 0.957 | 0.65 | PLNGAVHLYA | 988 | 0.681 | 0.329 | 29.16 |
| QAQTGSVQK | | | | | QAQTGVVQN | | | | |
| PLNGAVHLYA | 490 | 0.503 | 0.954 | 16.31 | PLNGAVHLYA | 989 | 0.622 | 0.328 | 0.42 |
| QAQTQLVQN | | | | | QAQVPQVQN | | | | |
| PLNGAVHLYA | 491 | 0.252 | 0.954 | 0.19 | PHNGAVHLYA | 990 | 0.295 | 0.327 | 0.14 |
| QAQTGGVHN | | | | | QAQTMSVQN | | | | |
| PLNGAVHLYA | 492 | 0.328 | 0.953 | 11.92 | QLNGAVHLYA | 991 | 0.493 | 0.327 | 0.56 |
| QAQRTPVQN | | | | | QAQTGWLQN | | | | |
| PLNGAVHLYA | 493 | 0.852 | 0.952 | 5.33 | PLNGAVHLYA | 992 | 0.118 | 0.327 | 1.03 |
| QAQRQQVQN | | | | | QAQTGCVQK | | | | |
| PLNGAVHLYA | 494 | 0.321 | 0.952 | 0.19 | SLNGAVHLYA | 993 | 0.712 | 0.327 | 0.28 |
| QAQTGSVRN | | | | | QAQTSLVQN | | | | |
| PLNGAVHLYA | 495 | 0.758 | 0.946 | 11.87 | PLNGAVHLYA | 994 | 0.422 | 0.326 | 0.23 |
| QAQVQGVQN | | | | | QAQTRWVQT | | | | |
| TLNGAVHLYA | 496 | 0.854 | 0.942 | 0.14 | TLNGAVHLYA | 995 | 0.743 | 0.325 | 0.09 |
| QAQVSPVQN | | | | | QAQTVQVQN | | | | |
| PLNGAVHLYA | 497 | 0.205 | 0.942 | 0.23 | ALNGAVHLYA | 996 | 0.762 | 0.324 | 0.09 |
| QAQPGWVQT | | | | | QAQKGGVQN | | | | |
| PLNGAVHLYA | 498 | 0.407 | 0.941 | 17.25 | PLNGAVHLYD | 997 | 0.143 | 0.323 | 0.09 |
| QAQSTQVQN | | | | | QAQVSGVQN | | | | |
| PLNGSVHLYA | 499 | 0.247 | 0.939 | 0.09 | PLNGAVHLYA | 998 | 0.554 | 0.323 | 0.65 |
| QAQTGWVEN | | | | | QAQTGLDQN | | | | |
| PLNGAVHLYA | 500 | 0.267 | 0.934 | 22.29 | PLNGAVPLYA | 999 | 0.387 | 0.323 | 0.42 |
| QAQQSPVQN | | | | | QAQTGWVQT | | | | |
| PLNGAVHLYA | 501 | 0.517 | 0.934 | 8.23 | PLNGAVHLYA | 1000 | 0.414 | 0.323 | 0.09 |
| QAQRYSVQN | | | | | QAQVSSVHN | | | | |
| PLNGAVHLYA | 502 | 0.267 | 0.930 | 9.77 | TLNGAVHLYA | 1001 | 0.264 | 0.322 | 0.09 |
| QAQTGWDQN | | | | | QAQTNSVQN | | | | |
| PLNGAVHLYA | 503 | 0.774 | 0.930 | 4.67 | PLNGAGHLYA | 1002 | 0.479 | 0.321 | 0.09 |
| QAQTQRVQN | | | | | QAQLSPVQN | | | | |
| ALNGAVHLYA | 504 | 0.330 | 0.926 | 0.23 | HLNGAVHLYA | 1003 | 0.532 | 0.321 | 0.19 |
| QAQTGWVRN | | | | | QAQTGRVQN | | | | |
| PLNGAVHLYA | 505 | 0.370 | 0.923 | 171 | PLNGAVHLYD | 100 | 0.872 | 0.320 | 0.09 |
| QPQTGWVQN | | | | | QAQTAMVQN | | | | |
| ALNGAVHLYA | 506 | 0.516 | 0.920 | 0.09 | PINGAVHLYA | 1005 | 0.646 | 0.320 | 0.33 |
| QAQVSGVQN | | | | | QAQTGWVQH | | | | |
| PLNGAVHLYA | 507 | 0.813 | 0.920 | 17.01 | PLNGAVQLYA | 1006 | 0.479 | 0.319 | 0.09 |
| QAQSAGVQN | | | | | QAQTLQVQN | | | | |
| PLNGAVHLYA | 508 | 0.734 | 0.918 | 0.09 | PLNGAVHLYA | 1007 | 0.323 | 0.318 | 0.28 |
| QAQSAPVQT | | | | | QAQKGWVQT | | | | |
| PLNGAVHLYA | 509 | 0.499 | 0.914 | 13.97 | PLNGAVHHYA | 1008 | 0.592 | 0.318 | 0.09 |
| QAQRQSVQN | | | | | QAQSTSVQN | | | | |
| PLNGAVHLYA | 510 | 0.591 | 0.906 | 20.42 | PLNGYVHLYA | 1009 | 0.187 | 0.317 | 2.99 |
| QAQSQPVQN | | | | | QAQTGWVQN | | | | |
| PLNGAVHLYA | 511 | 0.570 | 0.906 | 0.09 | PLNGAVHIYA | 1010 | 0.599 | 0.316 | 0.09 |
| QAQVASVKN | | | | | QAQVQSVQN | | | | |
| PLNGAVHLYA | 512 | 0.403 | 0.904 | 0.09 | PLIGAVHLYA | 1011 | 0.535 | 0.315 | 0.09 |
| QAQTAWVRN | | | | | QAQLSPVQN | | | | |
| SLNGAVHLYA | 513 | 0.491 | 0.904 | 0.09 | TLNGAVHLYA | 1012 | 0.774 | 0.315 | 0.0 |
| QAQTMQVQN | | | | | QAQLLPVQN | | | | |
| PLNGAVNLYA | 514 | 0.664 | 0.902 | 0.09 | PLNGAVHLYS | 1013 | 0.747 | 0.315 | 0.84 |
| QAQSSPVQN | | | | | QAQTGWVQT | | | | |
| PLNGAVHLYA | 515 | 0.318 | 0.901 | 0.23 | ALNGAVHLYA | 1014 | 0.444 | 0.315 | 0.14 |
| QAQTGGGQN | | | | | QAQTQLVQN | | | | |
| PLNGAVHLYD | 516 | 0.515 | 0.898 | 0.09 | PLNGAVHLYA | 1015 | 0.810 | 0.315 | 34.86 |
| QAQVASVQN | | | | | QAQSLPVQN | | | | |
| PLNGAVHLYA | 517 | 0.709 | 0.897 | 45.94 | PVNGAVHLYA | 1016 | 0.890 | 0.314 | 0.09 |
| QAQSTSVQN | | | | | QAQTGWVPN | | | | |
| PLNGTVHLYA | 518 | 0.403 | 0.894 | 0.23 | PLNGAVHLYA | 1017 | 0.247 | 0.313 | 0.19 |
| QAQTGWVQH | | | | | QAKTVSVQN | | | | |
| QLNGAVHLYA | 519 | 0.718 | 0.892 | 0.42 | PLNGAVHLYA | 1018 | 0.645 | 0.313 | 0.09 |
| QAQTSSVQN | | | | | QAQTTSVHN | | | | |
| PLDGAVHLYA | 520 | 0.613 | 0.892 | 0.09 | PVNGAVHLYA | 1019 | 0.765 | 0.313 | 939 |
| QAQTGWVHN | | | | | QAQTGWVQN | | | | |
| PLNGTVHLYA | 521 | 0.397 | 0.888 | 0.33 | PLNGAVHLYA | 1020 | 0.476 | 0.313 | 0.09 |
| QAQTGWVQK | | | | | QAHTGWVQI | | | | |
| PLNGAVHLYA | 522 | 0.369 | 0.888 | 20.28 | PLNGAVRLYA | 1021 | 0.611 | 0.313 | 0.09 |
| QAQVLGVQN | | | | | QAQTASVQN | | | | |
| PLNGAVHLYA | 523 | 0.640 | 0.887 | 5.7 | PLNGGVHLYA | 1022 | 0.646 | 0.313 | 0.09 |
| QAQNQPVQN | | | | | QAQTGLVQK | | | | |
| PLNGAVHLYA | 524 | 0.605 | 0.885 | 21.08 | PLNGAVNLYA | 1023 | 0.652 | 0.313 | 0.14 |
| QAQLGTVQN | | | | | QAQVMSVQN | | | | |
| PLNGAVHLYA | 525 | 0.637 | 0.882 | 7.57 | PLNGAVNLYA | 1024 | 0.682 | 0.312 | 0.09 |
| QAQRAGVQN | | | | | QAQSMSVQN | | | | |
| PVNGAVHLYA | 526 | 0.837 | 0.882 | 42.25 | PLNGAVHLYA | 1025 | 0.513 | 0.312 | 0.09 |
| QAQTGLVQN | | | | | PAQTGWGQN | | | | |
| PLNGGVHLYA | 527 | 0.529 | 0.881 | 0.33 | QLNGAVHLYA | 1026 | 0.595 | 0.311 | 0.47 |
| QAQTGWVQH | | | | | QAQTGWAQN | | | | |
| PLNGAVHLYA | 528 | 0.677 | 0.879 | 116.4 | PLNGAVHLYA | 1027 | 0.451 | 0.311 | 23.13 |
| QAQTGRVQN | | | | | QAQTVWVQN | | | | |
| PLNGAVHLYA | 529 | 0.266 | 0.876 | 0.56 | QLNGAVHLYA | 1028 | 0.742 | 0.311 | 0.09 |
| QAQTGGVKN | | | | | QAQSVSVQN | | | | |
| PLNGAVHLYA | 530 | 0.251 | 0.874 | 0.14 | PLNGAVHLYA | 1029 | 0.426 | 0.311 | 0.09 |
| QAQTAWLQN | | | | | QAQTAQLQN | | | | |
| PLNGAVHLYA | 531 | 0.269 | 0.870 | 0.14 | PLNGAVHLYA | 1030 | 0.453 | 0.311 | 0.09 |
| QAQTRWVQK | | | | | QAHVASVQN | | | | |
| PLNGAVHLYA | 532 | 0.699 | 0.858 | 0.09 | PLNGAVHLYA | 1031 | 0.440 | 0.310 | 0.09 |
| QAQLAPVKN | | | | | KAQRSTVQN | | | | |
| PLNGAVHHYA | 533 | 0.390 | 0.855 | 0.09 | QLNGAVHLYA | 1032 | 0.509 | 0.310 | 1.92 |
| QAQTSSVQN | | | | | QAQTGWVKN | | | | |
| PLNGAVHLYA | 534 | 0.402 | 0.851 | 0.14 | PLNGAVHLYA | 1033 | 0.281 | 0.310 | 0.28 |
| QAQTGSVQD | | | | | QAQTRWVKN | | | | |
| PLNGAVHLYA | 535 | 0.557 | 0.849 | 27.67 | PLNGAVHLYA | 1034 | 0.381 | 0.310 | 0.19 |
| QAQTGMVQN | | | | | QAQTAWIQN | | | | |
| PLNGAVHLYA | 536 | 0.647 | 0.848 | 15.14 | PLNGAVHLYA | 1035 | 0.393 | 0.310 | 0.09 |
| QAQLSNVQN | | | | | QAQLSQVKN | | | | |
| PLNGAVHLYA | 537 | 0.502 | 0.844 | 14.39 | SLNGAVHLYA | 1036 | 0.816 | 0.310 | 2284 |
| QAQRLPVQN | | | | | QAQTGWVQN | | | | |
| PLNGAVHLYA | 538 | 0.782 | 0.842 | 7.52 | PLNGAVHLYA | 1037 | 0.390 | 0.309 | 0.14 |
| QAQRQGVQN | | | | | QAQTSTVKN | | | | |
| PLNGAVHLYA | 539 | 0.563 | 0.839 | 0.09 | PLNGAVHLYA | 1038 | 0.654 | 0.309 | 16.82 |
| QAQSTPVQT | | | | | QAQALPVQN | | | | |
| QLNGNVHLYA | 540 | 0.844 | 0.838 | 5.56 | PLNGAVHLYD | 1039 | 0.158 | 0.309 | 0.33 |
| QAQTGWVQN | | | | | QAQTGWFQN | | | | |
| PLNGGVHLYA | 541 | 0.559 | 0.835 | 0.84 | PLNGAVHVYA | 1040 | 0.527 | 0.309 | 0.09 |
| QAQTGWVQT | | | | | QAQTGWFQN | | | | |
| PLNGAVHLYA | 542 | 0.470 | 0.833 | 0.09 | PINGAVHLYA | 1041 | 0.386 | 0.308 | 0.09 |
| QAQTTPVKN | | | | | QAQVGSVQN | | | | |
| PLNGAVHLYA | 543 | 0.700 | 0.832 | 18.65 | PLNGSVHLYA | 1042 | 0.418 | 0.308 | 0.14 |
| QAQRLTVQN | | | | | QAQTTGVQN | | | | |
| PLNGAVHLYA | 544 | 0.373 | 0.830 | 7.52 | PLNGAVHLYA | 1043 | 0.874 | 0.307 | 0.09 |
| QAQTLRVQN | | | | | KAQASPVQN | | | | |
| PLNGAVHLYA | 545 | 0.742 | 0.830 | 7.34 | PLNGSVHLYA | 1044 | 0.192 | 0.307 | 0.09 |
| QAQSAFVQN | | | | | QAQKAWVQN | | | | |
| SLNGAVHLYA | 546 | 0.586 | 0.824 | 0.09 | SLNGAVHLYA | 1045 | 0.270 | 0.307 | 0.09 |
| QAQTNSVQN | | | | | QAQVLGVQN | | | | |
| PLNGAVHLYA | 547 | 0.658 | 0.824 | 6.92 | PLNGAVHLYA | 1046 | 0.827 | 0.306 | 0.09 |
| QAQSVQVQN | | | | | QEQLMPVQN | | | | |
| PLDGAVHLYA | 548 | 0.568 | 0.823 | 0.09 | ALNGAVHLYA | 1047 | 0.872 | 0.306 | 18.51 |
| QAQTAAVQN | | | | | QSQTGWVQN | | | | |
| SLNGAVHLYA | 549 | 0.532 | 0.821 | 0.09 | PLNGYVHLYD | 1048 | 0.508 | 0.305 | 0.09 |
| QAQLMPVQN | | | | | QAQTGWVQN | | | | |
| PLDGAVHLYA | 550 | 0.621 | 0.820 | 0.47 | PLNGAVHLYA | 1049 | 0.505 | 0.305 | 0.09 |
| QAQTGWVQT | | | | | QAQTSMVQT | | | | |
| PLNGAVHLYA | 551 | 0.672 | 0.819 | 49.77 | QLNGAVHLYA | 1050 | 0.588 | 0.304 | 0.14 |
| QAQLLPVQN | | | | | QAQISSVQN | | | | |
| PLNGAVHLYA | 552 | 0.738 | 0.815 | 6.64 | PVNGAVHLYA | 1051 | 0.723 | 0.304 | 1.12 |
| QAQRTQVQN | | | | | QAQTGWVQT | | | | |
| PLNGAVHLYA | 553 | 0.254 | 0.813 | 0.79 | PLNGAVHLYA | 1052 | 0.713 | 0.303 | 0.09 |
| QAQTGSDQN | | | | | QEQTATVQN | | | | |
| PLNGAVHLYA | 554 | 0.430 | 0.808 | 0.09 | PLNGAVYLYA | 1053 | 0.352 | 0.302 | 0.09 |
| QAQVASDQN | | | | | QAQTVSVQN | | | | |
| PLNGAVNLYA | 555 | 0.744 | 0.805 | 0.09 | PLNGNVHLYA | 1054 | 0.521 | 0.302 | 0.09 |
| QAQLAPVQN | | | | | QAQTASVQN | | | | |
| PLNGSVHLYA | 556 | 0.160 | 0.804 | 0.37 | PLNGYVHLYA | 1055 | 0.556 | 0.301 | 0.09 |
| QAQTGWLQN | | | | | QAQTGLVQN | | | | |
| PLNGTVHLYA | 557 | 0.253 | 0.801 | 500.6 | PLNGAVHLYD | 1056 | 0.402 | 0.301 | 0.14 |
| QAQTGWVQN | | | | | QAQTLSVQN | | | | |
| PLNGAVHLYA | 558 | 0.857 | 0.801 | 0.14 | PLNGAVHLYA | 1057 | 0.499 | 0.300 | 0.14 |
| QAQVSPVKN | | | | | QAQTSSVQH | | | | |
| PLNGAVHLYA | 559 | 0.480 | 0.801 | 1.22 | SLNGAVHLYA | 1058 | 0.737 | 0.300 | 0.19 |
| QAQLPPVQN | | | | | QAQTGWVPN | | | | |
| PLNGAVHLYA | 560 | 0.521 | 0.794 | 0.14 | PLNGAVHLYA | 1059 | 0.839 | 0.300 | 0.09 |
| QAQSSPVQT | | | | | QAQTAMVKN | | | | |
| PLNGAVHLYA | 561 | 0.585 | 0.790 | 8.88 | TLNGAVHLYA | 1060 | 0.700 | 0.299 | 0.14 |
| QAQAQPVQN | | | | | QAQRLSVQN | | | | |
| PLNGDVHLYA | 562 | 0.434 | 0.789 | 0.09 | ALNGAVHLYA | 1061 | 0.341 | 0.297 | 1.64 |
| QAQTTSVQN | | | | | QAQTGWVQK | | | | |
| PLNGAVHLYA | 563 | 0.392 | 0.788 | 0.75 | PLNGAVHLYA | 1062 | 0.722 | 0.297 | 0.19 |
| QAQTPQVQN | | | | | KAQTALVQN | | | | |
| PLNGAVHLYA | 564 | 0.571 | 0.787 | 29.35 | QLNGAVHLYA | 1063 | 0.743 | 0.297 | 0.23 |
| QAQTSWVQN | | | | | QAQTAKVQN | | | | |
| PLNGAVHLYA | 565 | 0.254 | 0.784 | 0.51 | PLNGADHLYA | 1064 | 0.744 | 0.297 | 0.14 |
| QAQTGGDQN | | | | | QAQTTSVQN | | | | |
| PLNGAVHLYA | 566 | 0.547 | 0.782 | 0.14 | PLNGAVHLYA | 1065 | 0.259 | 0.297 | 0.93 |
| QAQLSPVKN | | | | | QAQTPWVQN | | | | |
| PLNGAVHLYA | 567 | 0.603 | 0.782 | 0.09 | PLNGTVHLYA | 1066 | 0.324 | 0.296 | 0.28 |
| QAQSSPVKN | | | | | QAQTGWIQN | | | | |
| PLNGAVHLYA | 568 | 0.727 | 0.781 | 8.41 | PLNGAVHLYA | 1067 | 0.286 | 0.296 | 0.23 |
| QAQNTTVQN | | | | | QAHTGWVQH | | | | |
| PLDGAVHLYA | 569 | 0.716 | 0.780 | 0.19 | PLNGAVHLYA | 1068 | 0.622 | 0.296 | 0.09 |
| QAQTGWVQH | | | | | RAQTASVQN | | | | |
| PLNGAVHLYA | 570 | 0.823 | 0.773 | 6.31 | TLNGAVHLYA | 1069 | 0.876 | 0.295 | 0.14 |
| QAQTTRVQN | | | | | QAQRSLVQN | | | | |
| PLDGAVHLYA | 571 | 0.722 | 0.767 | 0.09 | PLNGAVHLYA | 1070 | 0.481 | 0.294 | 0.14 |
| QAQTGWLQN | | | | | QAHTGWVQK | | | | |
| PLNGSVHLYA | 572 | 0.681 | 0.757 | 8.32 | PLNGDVHLYA | 1071 | 0.859 | 0.294 | 0.14 |
| QPQTGWVQN | | | | | QAQTAQVQN | | | | |
| PLNGAVHLYS | 573 | 0.794 | 0.755 | 25.1 | TLNGAVHLYA | 1072 | 0.407 | 0.294 | 0.14 |
| QAQTGLVQN | | | | | QAQTQPVQN | | | | |
| PLNGAVHLYA | 574 | 0.654 | 0.755 | 14.16 | PLNGAVHLYA | 1073 | 0.505 | 0.294 | 0.7 |
| QAQTQWVQN | | | | | QAQTPRVQN | | | | |
| PLNGSVHLYA | 575 | 0.187 | 0.754 | 0.33 | PRNGAVHLYA | 1074 | 0.200 | 0.293 | 0.09 |
| QAQTGWVQI | | | | | QAQTMSVQN | | | | |
| PLNGAVHLYA | 576 | 0.259 | 0.753 | 0.28 | PLNGAVHLYA | 1075 | 0.118 | 0.293 | 0.23 |
| QAQTGSVHN | | | | | QAHTVSVQN | | | | |
| ALNGAVHLYA | 577 | 0.367 | 0.751 | 1129 | PVNGAVHLYA | 1076 | 0.823 | 0.293 | 0.14 |
| QAQTGWVQN | | | | | QAQTGLVQT | | | | |
| PLNGTVHLYA | 578 | 0.224 | 0.749 | 0.14 | PLNGAVHLYA | 1077 | 0.899 | 0.292 | 87.25 |
| QAQTGWVRN | | | | | QAQSSSVQN | | | | |
| PLNGAVHLYA | 579 | 0.240 | 0.749 | 0.23 | PLNGAVHLYA | 1078 | 0.497 | 0.292 | 0.84 |
| QAQTGGLQN | | | | | QAQRPPVQN | | | | |
| SLNGAVHLYA | 580 | 0.712 | 0.748 | 0.09 | PLNGAVHLYT | 1079 | 0.779 | 0.291 | 0.09 |
| QAQVSGVQN | | | | | QAQVSPVQN | | | | |
| PLNGAVHLYA | 581 | 0.404 | 0.747 | 0.37 | PLNGAVPLYA | 1080 | 0.661 | 0.291 | 0.09 |
| QAQTAWVQK | | | | | QAQTTPVQN | | | | |
| PLNGAVHLYA | 582 | 0.660 | 0.747 | 0.19 | ALNGAVHLYA | 1081 | 0.293 | 0.290 | 1.59 |
| QAQTGRVQT | | | | | QAQTGWVKN | | | | |
| TLNGAVHLYA | 583 | 0.754 | 0.739 | 0.09 | SLNGAVHLYA | 1082 | 0.871 | 0.290 | 0.56 |
| QAQSAPVQN | | | | | QAQTGWVRN | | | | |
| PLNGAVHLYD | 584 | 0.449 | 0.738 | 0.09 | PLNGAVHLYA | 1083 | 0.316 | 0.288 | 0.09 |
| QAQTVAVQN | | | | | QAQLAGVKN | | | | |
| QLNGAVHLYA | 585 | 0.892 | 0.735 | 48.7 | PLNGAVHLYA | 1084 | 0.427 | 0.288 | 0.09 |
| QAQTGSVQN | | | | | QAQTSPAQN | | | | |
| PLNGAVHLYA | 586 | 0.858 | 0.733 | 5.37 | PLNGAVHLYA | 1085 | 0.539 | 0.288 | 0.19 |
| QAQNTQVQN | | | | | KAQLSSVQN | | | | |
| PLNGAVHLYA | 587 | 0.512 | 0.729 | 5.05 | PLNGAVHLYA | 1086 | 0.526 | 0.285 | 0.14 |
| QAQTGWLQN | | | | | QAQRSPVQT | | | | |
| PINGAVHLYA | 588 | 0.684 | 0.721 | 45.57 | PLNGAVHLYA | 1087 | 0.826 | 0.285 | 0.14 |
| QAQTGLVQN | | | | | HAQTMSVQN | | | | |
| PLDGAVHLYA | 589 | 0.600 | 0.719 | 0.09 | PLNGNVHLYA | 1088 | 0.429 | 0.284 | 0.14 |
| QAQTGWVQI | | | | | QAQTGWVKN | | | | |
| PLNGSVHLYA | 590 | 0.369 | 0.713 | 0.09 | PLNGAVHLYA | 1089 | 0.409 | 0.284 | 0.09 |
| QAQTGSVQT | | | | | QAQTGWVPH | | | | |
| PLNGAVQLYA | 591 | 0.460 | 0.711 | 0.09 | PLNGAVHLYA | 1090 | 0.442 | 0.284 | 0.09 |
| QAQTSSVQN | | | | | QAQPGWGQN | | | | |
| PLNGAVHLYA | 592 | 0.658 | 0.707 | 5.61 | PLNGVVHLYA | 1091 | 0.291 | 0.284 | 0.14 |
| QAQTYAVQN | | | | | QAQTVSVQN | | | | |
| PLNGAVHLYA | 593 | 0.575 | 0.703 | 81.37 | PLNGDVHLYA | 1092 | 0.499 | 0.283 | 0.19 |
| QAQTLSVQN | | | | | QAQTSSVQN | | | | |
| PLNGAVHLYA | 594 | 0.874 | 0.703 | 12.15 | PLNGAVHIYA | 1093 | 0.570 | 0.283 | 0.14 |
| QAQNLPVQN | | | | | QAQTLSVQN | | | | |
| PLNGAVHLYA | 595 | 0.328 | 0.702 | 0.09 | PLNGAVHLYA | 1094 | 0.597 | 0.283 | 0.19 |
| QAQTSSDQN | | | | | QAQIPPVQN | | | | |
| PLNGAVHLYA | 596 | 0.736 | 0.702 | 23.93 | SLNGAVHLYA | 1095 | 0.856 | 0.282 | 1.03 |
| QAQATSVQN | | | | | QAQTGWVQH | | | | |
| TLNGAVHLYA | 597 | 0.353 | 0.701 | 0.23 | PLNAAVHLYA | 1096 | 0.466 | 0.282 | 0.14 |
| QAQLSPVQN | | | | | QAQTGWDQN | | | | |
| PLNGAVHLYA | 598 | 0.271 | 0.700 | 0.14 | PLNGAVHRYA | 1097 | 0.823 | 0.282 | 0.09 |
| QAQTAWFQN | | | | | QAQTTSVQN | | | | |
| TLNGAVHLYA | 599 | 0.801 | 0.700 | 0.09 | PLNGSVHLYA | 1098 | 0.394 | 0.281 | 0.09 |
| QAQVTPVQN | | | | | QAQPGSVQN | | | | |
| TLNGAVHLYA | 600 | 0.202 | 0.696 | 0.09 | PLDGAVHLYA | 1099 | 0.838 | 0.281 | 0.09 |
| QAQTAAVQN | | | | | QAQTGWVEN | | | | |
| PLNGAVHLYA | 601 | 0.801 | 0.693 | 7.76 | PLNGAVHLYA | 1100 | 0.524 | 0.281 | 0.33 |
| QAQATQVQN | | | | | QAQTGRVKN | | | | |
| RLDGAVHLYA | 602 | 0.861 | 0.693 | 8.37 | PLNGAVHLYA | 1101 | 0.435 | 0.281 | 0.33 |
| QAQTGWVQN | | | | | QAQTGRLQN | | | | |
| QLNGAVHLYA | 603 | 0.840 | 0.691 | 0.09 | PLNGSVHLYA | 1102 | 0.584 | 0.281 | 0.28 |
| QAQTGWVEN | | | | | QAQTARVQN | | | | |
| PLNGAVHLYA | 604 | 0.278 | 0.691 | 0.19 | PLNGAVHLYD | 1103 | 0.378 | 0.280 | 0.19 |
| QAQVSSVKN | | | | | QAQLSSVQN | | | | |
| PLNGAVHLYA | 605 | 0.582 | 0.690 | 94.87 | ALNGAVHLYA | 1104 | 0.550 | 0.280 | 0.09 |
| QAQLSSVQN | | | | | QAQTRLVQN | | | | |
| PLNGAVHLYA | 606 | 0.209 | 0.689 | 0.33 | PLNGAVNLYA | 1105 | 0.780 | 0.280 | 0.19 |
| QAQTGSGQN | | | | | QAQTAQVQN | | | | |
| PLNGAVHLYA | 607 | 0.441 | 0.686 | 0.09 | PLNGAVHLYA | 1106 | 0.461 | 0.279 | 0.09 |
| QAQLQPVQT | | | | | QAQLSSVQH | | | | |
| PINGAVHLYA | 608 | 0.805 | 0.686 | 0.09 | PLNGAVHLYA | 1107 | 0.799 | 0.279 | 0.09 |
| QAQLSSVQN | | | | | QAHTGPVQN | | | | |
| PINGAVHLYA | 609 | 0.313 | 0.684 | 0.09 | PLKGAVHLYA | 1108 | 0.872 | 0.279 | 0.09 |
| QAQTVAVQN | | | | | QAQTLSVQN | | | | |
| PLNGAVHLYA | 610 | 0.546 | 0.680 | 0.09 | ALNGAVHLYA | 1109 | 0.499 | 0.279 | 0.09 |
| QAQVSAVKN | | | | | QAQKAWVQN | | | | |
| SLNGAVHLYA | 611 | 0.461 | 0.680 | 0.23 | PLNGAVHLYA | 1110 | 0.386 | 0.278 | 0.09 |
| QAQTVAVQN | | | | | QAQAGWVQT | | | | |
| PLNGAVHLYA | 612 | 0.882 | 0.680 | 22.29 | PLNGAVHLYA | 1111 | 0.709 | 0.278 | 0.19 |
| QAQTQAVQN | | | | | QAQTGLVQS | | | | |
| QLNGAVHLYA | 613 | 0.398 | 0.679 | 0.28 | PLNGAVHLYA | 1112 | 0.436 | 0.277 | 0.14 |
| QAQTAQVQN | | | | | QAQTGCVQI | | | | |
| PLNGAVHLYD | 614 | 0.309 | 0.676 | 0.14 | QLNGAVHLYA | 1113 | 0.529 | 0.276 | 1.26 |
| QAQTMSVQN | | | | | QAQPGWVQN | | | | |
| PLNGAVHLYA | 615 | 0.341 | 0.675 | 0.19 | PLNGAVHLYA | 1114 | 0.678 | 0.276 | 0.37 |
| QPQTGWVQK | | | | | QAQRPGVQN | | | | |
| PLNGAVHLYA | 616 | 0.855 | 0.672 | 30.47 | PLNGAVHLYA | 1115 | 0.265 | 0.276 | 0.09 |
| QAQVMPVQN | | | | | QAQTAAVQH | | | | |
| PLNGAVHLYA | 617 | 0.208 | 0.669 | 0.19 | PLNGADHLYA | 1116 | 0.728 | 0.276 | 0.09 |
| QAQTVSVQK | | | | | QAQTMPVQN | | | | |
| PLNGAVHLYA | 618 | 0.410 | 0.664 | 0.09 | PLNGAVHLYA | 1117 | 0.198 | 0.276 | 0.33 |
| QAQTAWAQN | | | | | KAQTGWVQT | | | | |
| PLNGAVHLYA | 619 | 0.764 | 0.664 | 12.06 | QLNGAVHLYA | 1118 | 0.819 | 0.275 | 0.09 |
| QAQNALVQN | | | | | QAQKAWVQN | | | | |
| TLNGAVHLYA | 620 | 0.217 | 0.663 | 0.09 | PLNGAVHLYA | 1119 | 0.116 | 0.274 | 0.98 |
| QAQVSAVQN | | | | | QAQTGCDQN | | | | |
| PLKGAVHLYA | 621 | 0.611 | 0.663 | 0.09 | PLNGTVHLYA | 1120 | 0.513 | 0.274 | 0.09 |
| QAQTTPVQN | | | | | QEQTGSVQN | | | | |
| QLNGSVHLYA | 622 | 0.776 | 0.657 | 96.83 | PLNGAVNLYA | 1121 | 0.671 | 0.274 | 0.09 |
| QAQTGWVQN | | | | | QAQSSLVQN | | | | |
| SLNGAVHLYA | 623 | 0.307 | 0.650 | 0.09 | ALNGAVHLYA | 1122 | 0.296 | 0.274 | 0.23 |
| QAQVATVQN | | | | | QAQTGWVEN | | | | |
| PLNGAVHLYA | 624 | 0.876 | 0.650 | 9.39 | PLNGTVHLYA | 1123 | 0.405 | 0.274 | 0.14 |
| QAQRMLVQN | | | | | QAQTGWVQY | | | | |
| PLNGAVHLYA | 625 | 0.589 | 0.649 | 0.09 | PINGAVHLYA | 1124 | 0.373 | 0.273 | 0.75 |
| QAQTVAVKN | | | | | QAQTGWVQK | | | | |
| PLNGAVHLYD | 626 | 0.523 | 0.649 | 0.14 | PLNGAVHLYA | 1125 | 0.820 | 0.273 | 0.09 |
| QAQTTSVQN | | | | | QAQTGRVRN | | | | |
| PLNGAVHLYA | 627 | 0.725 | 0.647 | 11.92 | PLNGAVHLYA | 1126 | 0.590 | 0.272 | 0.37 |
| QAQRQLVQN | | | | | QAQTGRDQN | | | | |
| PLNGAVHLYA | 628 | 0.754 | 0.645 | 28.79 | QLNGAVHLYA | 1127 | 0.409 | 0.272 | 0.23 |
| QAQTLGVQN | | | | | QAQSALVQN | | | | |
| PLNGAVHLYA | 629 | 0.889 | 0.645 | 0.09 | PLNGVVHLYA | 1128 | 0.422 | 0.272 | 0.09 |
| QAQLGPVQT | | | | | QAQTGWVQK | | | | |
| PLNGGVHLYA | 630 | 0.554 | 0.644 | 0.14 | PLNGAVHLYA | 1129 | 0.534 | 0.272 | 0.14 |
| QAQTGWVQD | | | | | QAHTGWGQN | | | | |
| PLNGAVHLYA | 631 | 0.205 | 0.640 | 0.98 | PLNGDVHLYA | 1130 | 0.638 | 0.272 | 0.09 |
| QAQTGSVKN | | | | | QAQRSLVQN | | | | |
| PLNGAVNLYA | 632 | 0.332 | 0.635 | 0.09 | PLNGNVHLYA | 1131 | 0.711 | 0.272 | 0.09 |
| QAQLASVQN | | | | | QAQTVWVQN | | | | |
| PLNGAVHLYD | 633 | 0.307 | 0.634 | 0.14 | PLNGAVHLYA | 1132 | 0.332 | 0.272 | 0.23 |
| QAQVSSVQN | | | | | QAPTGWVQH | | | | |
| PLNGAVHLYA | 634 | 0.355 | 0.632 | 0.14 | PLNGAVHLYS | 1133 | 0.725 | 0.271 | 0.23 |
| QAQTMSDQN | | | | | QAQTGWGQN | | | | |
| PLNGAVHLYA | 635 | 0.337 | 0.630 | 17.48 | ALNGSVHLYA | 1134 | 0.729 | 0.271 | 0.09 |
| QAQTGWVQK | | | | | QAQTGWVQT | | | | |
| PLNGAVHLYA | 636 | 0.203 | 0.630 | 0.09 | PLNGAVQLYA | 1135 | 0.347 | 0.271 | 0.09 |
| QAQLASVKN | | | | | QAQRSTVQN | | | | |
| PLNGGVHLYA | 637 | 0.490 | 0.628 | 0.23 | PLNGTVHLYA | 1136 | 0.434 | 0.271 | 0.28 |
| QAQTGWGQN | | | | | QAQTGTVQN | | | | |
| QLNGSVHLYA | 638 | 0.844 | 0.627 | 0.09 | PLNGTVHLYA | 1137 | 0.549 | 0.271 | 0.37 |
| QAQTGWVQT | | | | | QAQTGWVQI | | | | |

TABLE 42
NGS fold-enrichment of TTD-001 matured AAV capsid variants brain and DRG of
cynomolgus macaques and the brain of marmosets

| | | Brain of cynomolgus | | DRG of cynomolgus | | | |
|---|---|---|---|---|---|---|---|
| | | macaques | | macaques | | Brain of marmosets | |
| | | Fold | Fold | Fold | Fold | Fold | Fold |
| | SEQ | change | change | change | change | change | change |
| | ID | relative | relative | relative | relative | relative | relative |
| Sequence | NO | to AAV9 | to TTD-001 | to AAV9 | to TTD-001 | to AAV9 | to TTD-001 |
| ALNGAVHLYAQ | 1122 | 12.707 | 0.274 | 0.000 | 0.000 | 420.579 | 571.155 |
| AQTGWVEN | | | | | | | |
| PINGAVHLYAQ | 1155 | 8.716 | 0.188 | 2.100 | 13.718 | 573.779 | 779.203 |
| AQTGWVEN | | | | | | | |
| PLNGAVHLNAQ | 1156 | 0.919 | 0.020 | 2.175 | 14.212 | 677.878 | 920.572 |
| AQTGWVEN | | | | | | | |
| PLNGAVHLYAQ | 1157 | 5.505 | 0.119 | 0.000 | 0.000 | 263.098 | 357.292 |
| AQSGWVEN | | | | | | | |
| PLNGAVHLYAQ | 1158 | 8.721 | 0.188 | 0.827 | 5.405 | 236.026 | 320.528 |
| AQTAWVEN | | | | | | | |
| PLNGAVHLYAQ | 1159 | 4.126 | 0.089 | 0.245 | 1.603 | 475.164 | 645.282 |
| AQTGCVEN | | | | | | | |
| PLNGAVHLYAQ | 871 | 18.851 | 0.406 | 0.491 | 3.206 | 288.900 | 392.332 |
| AQTGGVEN | | | | | | | |
| PLNGAVHLYAQ | 1160 | 5.050 | 0.109 | 0.000 | 0.000 | 541.666 | 735.593 |
| AQTGLVEN | | | | | | | |
| PLNGAVHLYAQ | 818 | 20.878 | 0.450 | 2.856 | 18.662 | 571.096 | 775.559 |
| AQTGSVEN | | | | | | | |
| PLNGAVHLYAQ | 804 | 21.437 | 0.462 | 1.362 | 8.901 | 381.679 | 518.327 |
| AQTGWVEN | | | | | | | |
| PLNGSVHLYAQ | 499 | 43.595 | 0.939 | 2.334 | 15.248 | 490.137 | 665.615 |
| AQTGWVEN | | | | | | | |
| PVNGAVHLYAQ | 1161 | 6.311 | 0.136 | 0.000 | 0.000 | 506.376 | 687.669 |
| AQTGWVEN | | | | | | | |
| QLNGAVHLYAQ | 603 | 32.086 | 0.691 | 0.000 | 0.000 | 290.854 | 394.985 |
| AQTGWVEN | | | | | | | |
| SLNGAVHLYAQ | 1162 | 8.707 | 0.188 | 2.111 | 13.795 | 302.059 | 410.202 |
| AQTGWVEN | | | | | | | |
| TLNGAVHLYAQ | 1163 | 0.707 | 0.015 | 0.624 | 4.074 | 254.330 | 345.385 |
| AQTGWVEN | | | | | | | |
| ALNGAVHLYAQ | 819 | 20.878 | 0.450 | 0.667 | 4.356 | 232.682 | 315.986 |
| AQTGWVHN | | | | | | | |
| PHNGAVHLYAQ | 1164 | 3.604 | 0.078 | 4.410 | 28.816 | 177.855 | 241.530 |
| AQTGWVHN | | | | | | | |
| PINGAVHLYAQ | 1165 | 6.387 | 0.138 | 1.083 | 7.076 | 124.477 | 169.043 |
| AQTGWVHN | | | | | | | |
| PLKGAVHLYAQ | 1166 | 0.986 | 0.021 | 0.516 | 3.368 | 118.166 | 160.472 |
| AQTGWVHN | | | | | | | |
| PLNGAAHLYAQ | 1167 | 0.757 | 0.016 | 1.024 | 6.693 | 91.230 | 123.892 |
| AQTGWVHN | | | | | | | |
| PLNGADHLYAQ | 1168 | 0.842 | 0.018 | 0.540 | 3.529 | 15.514 | 21.069 |
| AQTGWVHN | | | | | | | |
| PLNGAGHLYAQ | 1169 | 1.198 | 0.026 | 1.451 | 9.479 | 106.338 | 144.409 |
| AQTGWVHN | | | | | | | |
| PLNGALHLYAQ | 1170 | 2.023 | 0.044 | 0.000 | 0.000 | 148.895 | 202.202 |
| AQTGWVHN | | | | | | | |
| PLNGAVDLYAQ | 1171 | 3.104 | 0.067 | 0.000 | 0.000 | 149.296 | 202.747 |
| AQTGWVHN | | | | | | | |
| PLNGAVHHYAQ | 1172 | 2.959 | 0.064 | 1.184 | 7.735 | 162.209 | 220.283 |
| AQTGWVHN | | | | | | | |
| PLNGAVHIYAQ | 1173 | 2.284 | 0.049 | 0.000 | 0.000 | 160.204 | 217.560 |
| AQTGWVHN | | | | | | | |
| PLNGAVHLDAQ | 1199 | 0.667 | 0.014 | 0.333 | 2.175 | 298.308 | 405.108 |
| AQTGWVHN | | | | | | | |
| PLNGAVHLNAQ | 1200 | 2.297 | 0.050 | 2.821 | 18.432 | 417.906 | 567.525 |
| AQTGWVHN | | | | | | | |
| PLNGAVHLSAQ | 1201 | 1.946 | 0.042 | 1.987 | 12.982 | 427.101 | 580.011 |
| AQTGWVHN | | | | | | | |
| PLNGAVHLYAK | 1202 | 7.514 | 0.162 | 0.000 | 0.000 | 75.629 | 102.705 |
| AQTGWVHN | | | | | | | |
| PLNGAVHLYAQ | 1203 | 2.441 | 0.053 | 0.998 | 6.522 | 78.923 | 107.179 |
| AKTGWVHN | | | | | | | |
| PLNGAVHLYAQ | 1204 | 1.527 | 0.033 | 0.000 | 0.000 | 132.644 | 180.133 |
| AQAGWVHN | | | | | | | |
| PLNGAVHLYAQ | 1205 | 4.707 | 0.101 | 0.000 | 0.000 | 24.765 | 33.632 |
| AQRGWVHN | | | | | | | |
| PLNGAVHLYAQ | 1206 | 3.622 | 0.078 | 0.000 | 0.000 | 117.858 | 160.053 |
| AQSGWVHN | | | | | | | |
| PLNGAVHLYAQ | 946 | 16.279 | 0.351 | 0.452 | 2.953 | 234.444 | 318.380 |
| AQTAWVHN | | | | | | | |
| PLNGAVHLYAQ | 1207 | 4.347 | 0.094 | 0.356 | 2.328 | 255.533 | 347.018 |
| AQTGCVHN | | | | | | | |
| PLNGAVHLYAQ | 491 | 44.261 | 0.954 | 1.261 | 8.238 | 175.856 | 238.815 |
| AQTGGVHN | | | | | | | |
| PLNGAVHLYAQ | 1208 | 6.977 | 0.150 | 0.000 | 0.000 | 140.966 | 191.435 |
| AQTGLVHN | | | | | | | |
| PLNGAVHLYAQ | 576 | 34.946 | 0.753 | 2.147 | 14.025 | 187.304 | 254.363 |
| AQTGSVHN | | | | | | | |
| PLNGAVHLYAQ | 755 | 23.437 | 0.505 | 0.865 | 5.655 | 192.126 | 260.911 |
| AQTGWVHN | | | | | | | |
| PLNGAVHLYAQ | 1209 | 8.212 | 0.177 | 0.000 | 0.000 | 319.448 | 433.817 |
| AQVSAVHN | | | | | | | |
| PLNGAVHLYAQ | 1210 | 2.986 | 0.064 | 0.000 | 0.000 | 93.114 | 126.451 |
| EQTGWVHN | | | | | | | |
| PLNGAVHLYAQ | 1211 | 1.725 | 0.037 | 0.000 | 0.000 | 26.926 | 36.566 |
| GQTGWVHN | | | | | | | |
| PLNGAVHLYDQ | 1212 | 1.514 | 0.033 | 0.279 | 1.822 | 142.794 | 193.917 |
| AQTGWVHN | | | | | | | |
| PLNGAVHLYGQ | 1213 | 1.401 | 0.030 | 0.000 | 0.000 | 116.707 | 158.491 |
| AQTGWVHN | | | | | | | |
| PLNGAVHLYSQ | 1214 | 9.806 | 0.211 | 0.000 | 0.000 | 100.716 | 136.775 |
| AQTGWVHN | | | | | | | |
| PLNGAVHRYAQ | 1215 | 5.991 | 0.129 | 0.000 | 0.000 | 13.869 | 18.834 |
| AQTGWVHN | | | | | | | |
| PLNGAVHVYAQ | 1216 | 2.959 | 0.064 | 0.000 | 0.000 | 159.742 | 216.933 |
| AQTGWVHN | | | | | | | |
| PLNGAVNLYAQ | 1217 | 2.387 | 0.051 | 0.631 | 4.121 | 78.989 | 107.268 |
| AQTGWVHN | | | | | | | |
| PLNGAVPLYAQ | 1218 | 2.946 | 0.063 | 0.774 | 5.060 | 124.967 | 169.708 |
| AQTGWVHN | | | | | | | |
| PLNGAVQLYAQ | 1219 | 2.338 | 0.050 | 1.085 | 7.091 | 105.426 | 143.170 |
| AQTGWVHN | | | | | | | |
| PLNGGVHLYAQ | 979 | 15.473 | 0.333 | 0.626 | 4.090 | 185.552 | 251.984 |
| AQTGWVHN | | | | | | | |
| PLNGSVHLYAQ | 703 | 25.824 | 0.556 | 1.283 | 8.381 | 360.426 | 489.465 |
| AQTGWVHN | | | | | | | |
| PLNGTVHLYAQ | 1220 | 10.315 | 0.222 | 0.000 | 0.000 | 159.224 | 216.229 |
| AQTGWVHN | | | | | | | |
| PRNGAVHLYAQ | 1221 | 2.842 | 0.061 | 1.016 | 6.636 | 163.614 | 222.192 |
| AQTGWVHN | | | | | | | |
| PVNGAVHLYAQ | 1222 | 8.023 | 0.173 | 0.761 | 4.971 | 402.937 | 547.197 |
| AQTGWVHN | | | | | | | |
| QLNGAVHLYAQ | 816 | 21.018 | 0.453 | 0.794 | 5.185 | 344.539 | 467.890 |
| AQTGWVHN | | | | | | | |
| SLNGAVHLYAQ | 1223 | 8.378 | 0.181 | 1.286 | 8.399 | 211.470 | 287.181 |
| AQTGWVHN | | | | | | | |
| TLNGAVHLYAQ | 1224 | 1.270 | 0.027 | 0.252 | 1.648 | 136.758 | 185.720 |
| AQTGWVHN | | | | | | | |
| ALNGAVHLYAQ | 1081 | 13.477 | 0.290 | 0.084 | 0.546 | 9.629 | 13.077 |
| AQTGWVKN | | | | | | | |
| ALNGAVNLYAQ | 1225 | 4.203 | 0.091 | 0.000 | 0.000 | 3.919 | 5.323 |
| AQTGWVKN | | | | | | | |
| KLNGAVHLYAQ | 1226 | 7.153 | 0.154 | 0.000 | 0.000 | 9.576 | 13.004 |
| AQTGWVKN | | | | | | | |
| PHNGAVHLYAQ | 1227 | 1.248 | 0.027 | 0.378 | 2.467 | 5.661 | 7.688 |
| AQTGWVKN | | | | | | | |
| PINGAVHLYAQ | 1228 | 7.644 | 0.165 | 0.143 | 0.933 | 7.560 | 10.267 |
| AQTGWVKN | | | | | | | |
| PLKGAVHLYAQ | 1229 | 0.748 | 0.016 | 0.103 | 0.675 | 7.088 | 9.626 |
| AQTGWVKN | | | | | | | |
| PLNAAVHLYAQ | 1230 | 2.473 | 0.053 | 0.000 | 0.000 | 18.662 | 25.343 |
| AQTGWVKN | | | | | | | |
| PLNGAAHLYAQ | 1231 | 0.901 | 0.019 | 0.390 | 2.547 | 5.894 | 8.004 |
| AQTGWVKN | | | | | | | |
| PLNGADHLYAQ | 1232 | 3.270 | 0.070 | 0.316 | 2.064 | 0.970 | 1.317 |
| AQTGWVKN | | | | | | | |
| PLNGAGHLYAQ | 1233 | 0.378 | 0.008 | 0.209 | 1.367 | 11.306 | 15.354 |
| AQTGWVKN | | | | | | | |
| PLNGALHLYAQ | 859 | 19.306 | 0.416 | 0.059 | 0.387 | 19.870 | 26.984 |
| AQTGWVKN | | | | | | | |
| PLNGAVDLYAQ | 1234 | 0.937 | 0.020 | 0.000 | 0.000 | 5.016 | 6.812 |
| AQTGWVKN | | | | | | | |
| PLNGAVHHYAQ | 1235 | 1.572 | 0.034 | 0.122 | 0.800 | 8.227 | 11.173 |
| AQTGWVKN | | | | | | | |
| PLNGAVHIYAQ | 1236 | 11.752 | 0.253 | 0.310 | 2.024 | 10.015 | 13.600 |
| AQTGWVKN | | | | | | | |
| PLNGAVHLDAQ | 1237 | 0.455 | 0.010 | 0.132 | 0.864 | 14.604 | 19.832 |
| AQTGWVKN | | | | | | | |
| PLNGAVHLNAQ | 1238 | 1.725 | 0.037 | 0.739 | 4.830 | 21.040 | 28.572 |
| AQTGWVKN | | | | | | | |
| PLNGAVHLSAQ | 1239 | 0.653 | 0.014 | 0.523 | 3.415 | 16.268 | 22.092 |
| AQTGWVKN | | | | | | | |
| PLNGAVHLYAE | 1240 | 0.752 | 0.016 | 0.000 | 0.000 | 0.825 | 1.120 |
| AQTGWVKN | | | | | | | |
| PLNGAVHLYAH | 1241 | 8.658 | 0.187 | 0.345 | 2.253 | 1.734 | 2.355 |
| AQTGWVKN | | | | | | | |
| PLNGAVHLYAK | 649 | 28.559 | 0.615 | 0.278 | 1.817 | 1.532 | 2.081 |
| AQTGWVKN | | | | | | | |
| PLNGAVHLYAL | 1242 | 2.311 | 0.050 | 0.000 | 0.000 | 9.892 | 13.433 |
| AQTGWVKN | | | | | | | |
| PLNGAVHLYAP | 1243 | 3.766 | 0.081 | 0.000 | 0.000 | 5.697 | 7.737 |
| AQTGWVKN | | | | | | | |
| PLNGAVHLYAQ | 1244 | 0.360 | 0.008 | 0.213 | 1.394 | 2.738 | 3.718 |
| AETGWVKN | | | | | | | |
| PLNGAVHLYAQ | 1245 | 7.865 | 0.169 | 0.099 | 0.648 | 1.486 | 2.018 |
| AQKGWVKN | | | | | | | |
| PLNGAVHLYAQ | 566 | 36.293 | 0.782 | 0.000 | 0.000 | 134.753 | 182.997 |
| AQLSPVKN | | | | | | | |
| PLNGAVHLYAQ | 960 | 15.955 | 0.344 | 0.000 | 0.000 | 51.408 | 69.813 |
| AQLSSVKN | | | | | | | |
| PLNGAVHLYAQ | 1246 | 10.171 | 0.219 | 0.000 | 0.000 | 13.928 | 18.914 |
| AQPGWVKN | | | | | | | |
| PLNGAVHLYAQ | 1247 | 3.450 | 0.074 | 0.000 | 0.000 | 7.922 | 10.758 |
| AQSGWVKN | | | | | | | |
| PLNGAVHLYAQ | 1248 | 11.748 | 0.253 | 0.000 | 0.000 | 8.691 | 11.802 |
| AQSSLVKN | | | | | | | |
| PLNGAVHLYAQ | 1249 | 5.856 | 0.126 | 0.169 | 1.107 | 10.452 | 14.194 |
| AQSSSVKN | | | | | | | |
| PLNGAVHLYAQ | 1250 | 4.473 | 0.096 | 0.000 | 0.000 | 14.173 | 19.247 |
| AQTACVKN | | | | | | | |
| PLNGAVHLYAQ | 763 | 23.248 | 0.501 | 0.000 | 0.000 | 11.433 | 15.526 |
| AQTASVKN | | | | | | | |
| PLNGAVHLYAQ | 828 | 20.599 | 0.444 | 0.333 | 2.174 | 6.667 | 9.054 |
| AQTAWVKN | | | | | | | |
| PLNGAVHLYAQ | 1251 | 0.721 | 0.016 | 0.000 | 0.000 | 14.566 | 19.781 |
| AQTEWVKN | | | | | | | |
| PLNGAVHLYAQ | 1252 | 8.239 | 0.178 | 0.000 | 0.000 | 10.794 | 14.659 |
| AQTGAVKN | | | | | | | |
| PLNGAVHLYAQ | 1253 | 8.144 | 0.175 | 0.222 | 1.452 | 14.865 | 20.187 |
| AQTGCVKN | | | | | | | |
| PLNGAVHLYAQ | 529 | 40.644 | 0.876 | 0.167 | 1.092 | 8.407 | 11.417 |
| AQTGGVKN | | | | | | | |
| PLNGAVHLYAQ | 1254 | 10.090 | 0.217 | 0.145 | 0.945 | 10.946 | 14.864 |
| AQTGLVKN | | | | | | | |
| PLNGAVHLYAQ | 1100 | 13.059 | 0.281 | 0.000 | 0.000 | 2.607 | 3.541 |
| AQTGRVKN | | | | | | | |
| PLNGAVHLYAQ | 631 | 29.707 | 0.640 | 0.516 | 3.369 | 7.169 | 9.735 |
| AQTGSVKN | | | | | | | |
| PLNGAVHLYAQ | 765 | 23.167 | 0.499 | 0.260 | 1.700 | 10.937 | 14.852 |
| AQTGWVKN | | | | | | | |
| PLNGAVHLYAQ | 720 | 25.032 | 0.539 | 1.771 | 11.569 | 10.981 | 14.913 |
| AQTLSVKN | | | | | | | |
| PLNGAVHLYAQ | 1033 | 14.369 | 0.310 | 1.308 | 8.546 | 1.210 | 1.643 |
| AQTRWVKN | | | | | | | |
| PLNGAVHLYAQ | 700 | 26.099 | 0.562 | 0.000 | 0.000 | 29.844 | 40.528 |
| AQTSSVKN | | | | | | | |
| PLNGAVHLYAQ | 1037 | 14.347 | 0.309 | 0.000 | 0.000 | 12.484 | 16.953 |
| AQTSTVKN | | | | | | | |
| PLNGAVHLYAQ | 1255 | 4.212 | 0.091 | 0.000 | 0.000 | 34.651 | 47.056 |
| AQTSWVKN | | | | | | | |
| PLNGAVHLYAQ | 625 | 30.131 | 0.649 | 0.000 | 0.000 | 22.666 | 30.781 |
| AQTVAVKN | | | | | | | |
| PLNGAVHLYAQ | 325 | 69.266 | 1.492 | 0.231 | 1.508 | 22.335 | 30.332 |
| AQTVSVKN | | | | | | | |
| PLNGAVHLYAQ | 771 | 22.784 | 0.491 | 0.000 | 0.000 | 1.612 | 2.189 |
| AQTVWVKN | | | | | | | |
| PLNGAVHLYAQ | 610 | 31.581 | 0.680 | 0.354 | 2.310 | 21.595 | 29.326 |
| AQVSAVKN | | | | | | | |
| PLNGAVHLYAQ | 558 | 37.158 | 0.801 | 0.000 | 0.000 | 40.525 | 55.033 |
| AQVSPVKN | | | | | | | |
| PLNGAVHLYAQ | 1256 | 7.694 | 0.166 | 0.000 | 0.000 | 1.548 | 2.102 |
| EQTGWVKN | | | | | | | |
| PLNGAVHLYAQ | 1257 | 7.014 | 0.151 | 0.000 | 0.000 | 5.931 | 8.054 |
| SQTGWVKN | | | | | | | |
| PLNGAVHLYDQ | 1258 | 2.761 | 0.059 | 0.146 | 0.956 | 7.745 | 10.518 |
| AQTGWVKN | | | | | | | |
| PLNGAVHLYEQ | 1259 | 7.658 | 0.165 | 0.000 | 0.000 | 7.124 | 9.675 |
| AQTGWVKN | | | | | | | |
| PLNGAVHLYGQ | 1260 | 0.874 | 0.019 | 0.000 | 0.000 | 5.745 | 7.802 |
| AQTGWVKN | | | | | | | |
| PLNGAVHLYSQ | 1261 | 6.910 | 0.149 | 0.000 | 0.000 | 11.682 | 15.865 |
| AQTGLVKN | | | | | | | |
| PLNGAVHLYSQ | 1263 | 7.536 | 0.162 | 0.245 | 1.599 | 4.415 | 5.996 |
| AQTGWVKN | | | | | | | |
| PLNGAVHLYTQ | 1264 | 0.595 | 0.013 | 0.166 | 1.086 | 10.157 | 13.793 |
| AQTGWVKN | | | | | | | |
| PLNGAVHPYAQ | 1265 | 0.788 | 0.017 | 0.178 | 1.162 | 3.527 | 4.790 |
| AQTGWVKN | | | | | | | |
| PLNGAVHRSLQ | 1266 | 0.153 | 0.003 | 0.449 | 2.931 | 7.938 | 10.780 |
| AQTGWVKN | | | | | | | |
| PLNGAVHRYAQ | 1267 | 1.878 | 0.040 | 0.000 | 0.000 | 2.446 | 3.322 |
| AQTGWVKN | | | | | | | |
| PLNGAVHVYAQ | 1268 | 1.937 | 0.042 | 0.123 | 0.802 | 7.871 | 10.689 |
| AQTGWVKN | | | | | | | |
| PLNGAVLLYAQ | 1269 | 4.149 | 0.089 | 0.211 | 1.379 | 3.878 | 5.266 |
| AQTGWVKN | | | | | | | |
| PLNGAVNLYAQ | 1270 | 3.505 | 0.076 | 0.000 | 0.000 | 1.145 | 1.555 |
| AQTGCVKN | | | | | | | |
| PLNGAVNLYAQ | 1271 | 4.586 | 0.099 | 0.262 | 1.710 | 2.124 | 2.884 |
| AQTGWVKN | | | | | | | |
| PLNGAVNLYDQ | 1272 | 2.486 | 0.054 | 0.000 | 0.000 | 9.468 | 12.858 |
| AQTGWVKN | | | | | | | |
| PLNGAVPLYAQ | 1274 | 1.622 | 0.035 | 0.000 | 0.000 | 7.002 | 9.509 |
| AQTGWVKN | | | | | | | |
| PLNGAVQLYAQ | 1275 | 2.014 | 0.043 | 0.381 | 2.487 | 11.888 | 16.145 |
| AQTGWVKN | | | | | | | |
| PLNGAVRSTAQ | 1276 | 0.505 | 0.011 | 0.662 | 4.326 | 24.950 | 33.883 |
| AQTGWVKN | | | | | | | |
| PLNGAVSLRAQ | 1277 | 0.725 | 0.016 | 1.267 | 8.277 | 6.291 | 8.543 |
| AQTGWVKN | | | | | | | |
| PLNGAVSSRAQ | 1278 | 0.739 | 0.016 | 1.091 | 7.130 | 19.478 | 26.452 |
| AQTGWVKN | | | | | | | |
| PLNGDVHLYAQ | 1149 | 2.905 | 0.063 | 0.000 | 0.000 | 10.919 | 14.829 |
| AQTGCVKN | | | | | | | |
| PLNGDVHLYAQ | 1151 | 2.559 | 0.055 | 0.235 | 1.539 | 9.737 | 13.224 |
| AQTGWVKN | | | | | | | |
| PLNGGVHLYAQ | 864 | 19.077 | 0.411 | 0.292 | 1.905 | 4.576 | 6.214 |
| AQTGWVKN | | | | | | | |
| PLNGPVHLYAQ | 1153 | 2.216 | 0.048 | 0.000 | 0.000 | 5.169 | 7.019 |
| AQTGWVKN | | | | | | | |
| PLNGSVHLYAQ | 1154 | 5.707 | 0.123 | 0.000 | 0.000 | 21.281 | 28.900 |
| AQTGCVKN | | | | | | | |
| PLNGSVHLYAQ | 791 | 22.050 | 0.475 | 0.184 | 1.202 | 13.110 | 17.803 |
| AQTGWVKN | | | | | | | |
| PLNGTVHLYAQ | 978 | 15.482 | 0.334 | 0.000 | 0.000 | 17.576 | 23.868 |
| AQTGWVKN | | | | | | | |
| PLNSAVHLYAQ | 1174 | 1.468 | 0.032 | 0.000 | 0.000 | 3.674 | 4.989 |
| AQTGWVKN | | | | | | | |
| PLSGAVHLYAQ | 1175 | 0.680 | 0.015 | 0.000 | 0.000 | 8.111 | 11.015 |
| AQTGWVKN | | | | | | | |
| PPNGAVHLYAQ | 1176 | 0.829 | 0.018 | 0.546 | 3.567 | 9.008 | 12.233 |
| AQTGWVKN | | | | | | | |
| PRNGAVHLYAQ | 1177 | 1.194 | 0.026 | 0.421 | 2.751 | 9.143 | 12.417 |
| AQTGWVKN | | | | | | | |
| PVNGAVHLYAQ | 1178 | 8.167 | 0.176 | 0.145 | 0.946 | 11.979 | 16.268 |
| AQTGWVKN | | | | | | | |
| QLNGAVHIYAQ | 1179 | 6.982 | 0.150 | 0.000 | 0.000 | 14.405 | 19.563 |
| AQTGWVKN | | | | | | | |
| QLNGAVHLYAQ | 1180 | 2.446 | 0.053 | 0.000 | 0.000 | 14.453 | 19.627 |
| AQTGCVKN | | | | | | | |
| QLNGAVHLYAQ | 1181 | 7.518 | 0.162 | 0.000 | 0.000 | 1.613 | 2.190 |
| AQTGLVKN | | | | | | | |
| QLNGAVHLYAQ | 966 | 15.815 | 0.341 | 1.130 | 7.380 | 3.272 | 4.443 |
| AQTGSVKN | | | | | | | |
| QLNGAVHLYAQ | 1032 | 14.378 | 0.310 | 0.137 | 0.893 | 10.495 | 14.253 |
| AQTGWVKN | | | | | | | |
| QLNGAVHLYDQ | 1182 | 2.378 | 0.051 | 0.000 | 0.000 | 1.224 | 1.663 |
| AQTGWVKN | | | | | | | |
| RLNGAVHLYAQ | 1183 | 3.131 | 0.067 | 0.000 | 0.000 | 4.894 | 6.646 |
| AQTGWVKN | | | | | | | |
| SINGAVHLYAQ | 1184 | 1.234 | 0.027 | 0.409 | 2.671 | 4.660 | 6.328 |
| AQTGWVKN | | | | | | | |
| SLNGAVHLYAQ | 1185 | 6.104 | 0.132 | 0.328 | 2.143 | 11.122 | 15.104 |
| AQTGWVKN | | | | | | | |
| SLNGAVNLYAQ | 1186 | 1.387 | 0.030 | 0.833 | 5.444 | 5.215 | 7.083 |
| AQTGWVKN | | | | | | | |
| TLNGAVHLYAQ | 1187 | 2.176 | 0.047 | 0.108 | 0.707 | 5.355 | 7.272 |
| AQTGWVKN | | | | | | | |
| TLNGAVNLYAQ | 1188 | 1.333 | 0.029 | 0.000 | 0.000 | 1.292 | 1.754 |
| AQTGWVKN | | | | | | | |
| PLNGAVHHYAQ | 1189 | 0.937 | 0.020 | 0.000 | 0.000 | 982.466 | 1334.208 |
| AQTGWVPN | | | | | | | |
| PLNGAVHLNAQ | 1190 | 3.698 | 0.080 | 3.072 | 20.072 | 5448.821 | 7399.606 |
| AQTGWVPN | | | | | | | |
| PLNGAVHLSAQ | 1191 | 3.356 | 0.072 | 3.362 | 21.966 | 5527.158 | 7505.989 |
| AQTGWVPN | | | | | | | |
| PLNGAVHLYAQ | 1192 | 8.959 | 0.193 | 0.969 | 6.329 | 3019.591 | 4100.664 |
| AQTGCVPN | | | | | | | |
| PLNGAVHLYAQ | 314 | 71.770 | 1.546 | 2.071 | 13.534 | 2408.300 | 3270.518 |
| AQTGWVPN | | | | | | | |
| PLNGAVNLYAQ | 1193 | 5.356 | 0.115 | 1.809 | 11.822 | 2103.432 | 2856.501 |
| AQTGWVPN | | | | | | | |
| PLNGTVHLYAQ | 885 | 18.270 | 0.394 | 0.000 | 0.000 | 4688.758 | 6367.425 |
| AQTGWVPN | | | | | | | |
| PVNGAVHLYAQ | 1016 | 14.568 | 0.314 | 0.000 | 0.000 | 1269.496 | 1724.000 |
| AQTGWVPN | | | | | | | |
| QLNGAVHLYAQ | 648 | 28.572 | 0.616 | 0.000 | 0.000 | 14152.524 | 19219.405 |
| AQTGWVPN | | | | | | | |
| SLNGAVHLYAQ | 1058 | 13.914 | 0.300 | 1.876 | 12.256 | 1800.081 | 2444.545 |
| AQTGWVPN | | | | | | | |
| PLNGAVHLYAQ | 476 | 46.410 | 1 | 0.153 | 1 | 0.736 | 1 |
| AQTGWVQN | | | | | | | |
| AQAQAQTGWVQ | 1194 | 1 | 0.0215 | 1 | 6.533 | 1 | 1.358 |
| N | | | | | | | |

### Example 14. Dose-Response Evaluation of TTD-001 in Non-Human Primates (NHPs)

[1700] This Example investigates the minimal dose of an AAV particle comprising a TTD-001 capsid variant (SEQ ID NO: 3623 (DNA) and 3636 (amino acid), comprising SEQ ID NO: 3648)) that is sufficient to achieve near-physiological expression of a payload, e.g., a single stranded payload, in the central nervous system of adult cynomolgus macaques (Macaca fascicularis) via intravenous systemic delivery.

[1701] AAV particles comprising the TTD-001 capsid variant comprising a single stranded viral genome encoding a hemagglutinin (HA)-tagged NHP protein under the control of a ubiquitous CBA promoter were injected intravenously into adult male NHPs (cynomolgus macaque) (n=3, 5-7 years of age) at various doses spanning a 30-fold range, which included 6.7e11 VG/kg, 2e12 VG/kg, 6.7e12 VG/kg, and 2e13 VG·kg. The in-life period was 28 days and then various CNS and peripheral tissues were collected for measuring transgene mRNA expression by RT-qPCR, viral DNA levels by ddPCR, transgene protein expression by ELISA, and biodistribution by immunohistochemistry (staining with an anti-HA antibody).

[1702] Widespread transgene expression was detected in the spinal cord and the brain the NHPs at doses of 2e12 VG/kg and above, especially in the putamen, thalamus, globus pallidus and brainstem (Tables 43-45). Viral DNA and mRNA were readily detectable in all NHPs and showed a consistent dose response (Table 43, Table 44).

[1703] More specifically, in the brain, dose-dependent distribution of the AAV particles comprising the TTD-001 capsid was observed in the cortical regions (frontal, motor, and somatosensory), caudate, putamen, thalamus, substantia nigra, globus pallidus, hippocampus, amygdala, hypothalamus, cerebellar cortex, and dentate nucleus. Additionally, for each dose administered, there was comparable distribution of the AAV particles comprising the TTD-001 capsid in each brain region, including the cortex as well as the deeper brain regions such as the caudate, putamen, thalamus, substantia nigra, globus pallidus, hippocampus, amygdala, hypothalamus, and dentate nucleus (Table 43).

[1704] With respect to the spinal cord, dose-dependent distribution of the AAV particles comprising the TTD-001 capsid was observed in the cervical, thoracic, and lumbar spinal cord regions and the relative distribution across all these regions was similar for each dosing group. As shown in Table 43, low biodistribution was measured in the DRG, but a dose-dependent distribution of the AAV particles comprising the TTD-001 capsid was observed in the cervical, thoracic, and lumbar DRG regions and the relative distribution across all DRG regions was similar for each dosing group.

[1705] With respect to the peripheral tissues, a dose-dependent distribution of the AAV particles comprising the TTD-001 capsid was observed in the liver, hear, and the vastus lateralis (muscle) (Table 43).

TABLE 43
Quantification of viral genomes (biodistribution) by ddPCR following intravenous
administration of various doses of AAV particles comprising a TTD-001 capsid

| | Quantification of viral genomes in the Brain (VG/diploid cell) | | | | | | |
|---|---|---|---|---|---|---|---|
| Dose | Frontal | Motor | Somatosensory | | | | Dentate |
| (VG/kg) | Cortex | Cortex | Cortex | Caudate | Putamen | Thalamus | Nucleus |
| 6.7e11 | 0.01 | 0.11 | 0.07 | 0.16 | 0.13 | 0.17 | 0.03 |
| 2e12 | 2.0 | 1.72 | 0.92 | 1.27 | 0.89 | 1.16 | 0.42 |
| 6.7e12 | 4.5 | 4.20 | 3.44 | 3.44 | 2.74 | 3.04 | 2.27 |
| 2e13 | 6.7 | 7.50 | 3.04 | 6.32 | 4.94 | 6.34 | 4.14 |

| Dose | Substantia | Globus | | | | |
|---|---|---|---|---|---|---|
| (VG/kg) | Nigra | Pallidus | Hippocampus | Amygdala | Hypothalamus | Cerebellar Cortex |
| 6.7e11 | 0.12 | 0.10 | 0.1 | 0.16 | 0.14 | 0.02 |
| 2e12 | 1.12 | 1.28 | 2.1 | 2.83 | 1.77 | 0.13 |
| 6.7e12 | 2.33 | 2.47 | 2.6 | 4.38 | 2.37 | 0.53 |
| 2e13 | 5.81 | 4.43 | 5.5 | 6.13 | 4.63 | 4.18 |

| | Quantification of viral genomes in the Spinal Cord and DRG (VG/diploid cell) | | | | | |
|---|---|---|---|---|---|---|
| | Cervical | Thoracic | | | | |
| Dose | Spinal | Spinal | Lumbar Spinal | Cervical | | |
| (VG/kg) | Cord | Cord | Cord | DRG | Thoracic DRG | Lumbar DRG |
| 6.7e11 | 0.06 | 0.03 | 0.05 | 0.002 | 0.003 | 0.007 |
| 2e12 | 0.74 | 0.42 | 0.64 | 0.007 | 0.006 | 0.019 |
| 6.7e12 | 1.35 | 0.94 | 1.58 | 0.015 | 0.022 | 0.033 |
| 2e13 | 5.35 | 3.48 | 6.48 | 0.060 | 0.079 | 0.070 |

| Dose | Quantification of viral genomes in the peripheral tissues (VG/diploid cell) | | | |
|---|---|---|---|---|
| (VG/kg) | Heart | Liver | Kidney | Vastus lateralis (muscle) |
| 6.7e11 | 0.11 | 1.2 | 0.04 | 0.002 |
| 2e12 | 0.10 | 12.4 | 0.71 | 0.02 |
| 6.7e12 | 0.30 | 68.5 | 1.18 | 0.06 |
| 2e13 | 0.56 | 132.3 | 0.84 | 0.15 |

[1706] Additionally, dose-dependent transgene mRNA expression by the AAV particles comprising the TTD-001 capsid was observed in the brain, spinal cord, DRG, and peripheral tissues (Table 44). The lowest dose of the AAV particles comprising the TTD-001 capsid protein resulted in higher transgene mRNA and protein expression than a 30-fold higher dose of wild-type AAV9. Comparison of the transgene mRNA with the matching endogenous transcript indicated that a dose of 2e12VG/kg was sufficient to achieve supra-physiological levels in the central nervous system (CNS), while showing low transduction in the liver and the dorsal root ganglia (DRG) (Table 44).

TABLE 44
Quantification of transgene mRNA by RT-qPCR following
intravenous administration of various doses of
AAV particles comprising a TTD-001 capsid
Transgene mRNA relative to housekeeping gene

| | Dose (VG/kg) | | | |
|---|---|---|---|---|
| | 6.7e11 | 2e12 | 6.7e12 | 2e13 |
| Tissue | VG/kg | VG/kg | VG/kg | VG/kg |
| Frontal Cortex | 0.02 | 0.29 | 3.42 | 4.51 |
| Motor Cortex | 0.2 | 1.65 | 9.42 | 26.5 |
| Putamen | 0.11 | 0.38 | 1.76 | 2.52 |
| Dentate Nucleus | 0.01 | 0.26 | 4.38 | 15.8 |
| Cervical Spinal Cord | 0.07 | 0.63 | 2.25 | 8.26 |
| Thoracic Spinal Cord | 0.06 | 0.72 | 2.00 | 5.37 |
| Lumbar Spinal Cord | 0.10 | 0.83 | 6.71 | 27.22 |
| Cervical DRG | 0.02 | 0.29 | 0.99 | 3.58 |
| Thoracic DRG | 0.01 | 0.28 | 1.08 | 4.36 |
| Lumbar DRG | 0.02 | 0.56 | 2.21 | 4.44 |
| Heart | 0.002 | 0.33 | 5.37 | 11.45 |
| Liver | 0.04 | 0.3 | 1.43 | 2.22 |

Transgene mRNA vs. endogenous transcript
(fold change relative to vehicle control)

| | Dose (VG/kg) | | | | |
|---|---|---|---|---|---|
| | | 6.7e11 | 2e12 | 6.7e12 | 2e13 |
| Tissue | Vehicle | VG/kg | VG/kg | VG/kg | VG/kg |
| Frontal Cortex | 1.0 | 0.97 | 2.04 | 12.79 | 17.04 |
| Motor Cortex | 1.0 | 2.3 | 9.4 | 42.0 | 118.3 |
| Putamen | 1.0 | 1.59 | 3.00 | 11.25 | 16.57 |
| Dentate Nucleus | 1.0 | 0.7 | 1.7 | 17.0 | 59.9 |
| Cervical Spinal Cord | 1.0 | 1.18 | 2.65 | 12.57 | 43.16 |
| Thoracic Spinal Cord | 1.0 | 1.07 | 2.26 | 10.61 | 27.96 |
| Lumbar Spinal Cord | 1.0 | 1.16 | 3.06 | 31.30 | 122.75 |
| Cervical DRG | 1.0 | 1.0 | 1.63 | 3.24 | 9.09 |
| Thoracic DRG | 1.0 | 0.98 | 1.4 | 3.02 | 7.72 |
| Lumbar DRG | 1.0 | 1.05 | 2.3 | 4.78 | 11.72 |
| Heart | 1.0 | 1.34 | 1.67 | 6.55 | 13.57 |
| Liver | 1.0 | 0.9 | 1.2 | 2.8 | 3.2 |

TABLE 45
Quantification of total transgene protein expression in the peripheral
tissues by ELISA following intravenous administration of various
doses of AAV particles comprising a TTD-001 capsid

| | Cervical DRG | Heart | Liver |
|---|---|---|---|
| Dose | (Transgene ng/mL | (Transgene ng/mL | (Transgene ng/mL |
| (VG/kg) | relative to vehicle) | relative to vehicle) | relative to vehicle) |
| Vehicle | 1.0 | 1.0 | 1.0 |
| 6.7e11 | 1.1 | 1.0 | 0.87 |
| 2e12 | 1.5 | 1.04 | 1.00 |
| 6.7e12 | 1.7 | 2.23 | 0.93 |
| 2e13 | 7.4 | 3.69 | 1.24 |

[1707] By immunohistochemistry (IHC), widespread transduction by AAV particles comprising the TTD-001 capsid variant was observed in multiple brain regions of the NHPs as compared to AAV9 at all doses administered, particularly at the medium to high doses (2e12 VG/kg, 6.7e12 VG/kg, and 2e13 VG/kg). By IHC, dose dependent expression of AAV particles comprising the TTD-001 capsid variant was observed in the brain, specifically in the temporal cortex, caudate, putamen, thalamus, substantia nigra, hippocampus, and cerebellar. Morphologically, transgene expression was observed in the neuronal cell body and the neuropil from neurons in these brain regions, including the Purkinje neurons in the cerebellar cortex and the neurons deep in the cerebellar nuclei. In the brain stem, the transgene expression was observed in various structures including the gracile-nuclei, cuneate-nuclei, and the Inferior Olivary complex.

[1708] In the spinal cord of the NHPs, dose dependent transduction was also observed in the cervical, lumbar, and thoracic regions when measured by IHC, with the most intense and widespread staining occurring at the 6.7e12 VG/kg and 2e13 VG/kg doses. Substantial staining of the motor neurons in the spinal cord was also observed at the lower dose of 2e12 VG/kg. Furthermore, the cellular tropism of the TTD-001 capsid in the spinal cord appeared to be largely neuronal and neuropil at all doses in all regions (e.g., cervical, thoracic, and lumbar) investigated.

[1709] In the DRG of the NHPs, dose dependent transduction was also observed in the cervical, lumbar, and thoracic regions, with the most staining occurring at the 6.7e12 VG/kg and 2e13 VG/kg doses. The lower dose of 2e12 VG/kg showed significantly less staining and was comparable to particles comprising an AAV9 capsid that were administered at a higher dose of 2e13 VG/kg. The cellular tropism of the TTD-001 capsid in the DRG appeared to be largely neuronal at all doses in all regions investigated.

[1710] Transduction of AAV particles comprising the TTD-001 capsid variant was also measured by IHC in various peripheral tissues of the NHPs. In the liver, the transduction observed was more variable but appeared to follow a dose-dependent trend and appeared to be lower than by particles comprising an AAV9 capsid that were administered at a dose of 2e13 VG/kg. Minimal staining was observed in the quadriceps at all doses tested. In the heart, a dose-dependent trend in transduction was also observed.

[1711] Additionally, the staining of various cells in the brain and/or spinal cord following transduction with the AAV particles comprising the TTD-001 capsid at the doses investigated was quantified. As shown in FIG. 6B, a dose of 2e13 VG/kg was sufficient to transduce >40% of total cells in highly permissive brain regions (thalamus, caudate, putamen) and >20% total cells in less permissive regions (entorhinal cortex, auditory cortex, hippocampus). Even at a lower dose of 6.7e12, this was sufficient to transduce >20% of cells in the thalamus, caudate, putamen, and cerebellum (FIG. 6A). As shown in FIG. 6C, the dose of 2e13 VG/kg also resulted in transduction of >90% SMI311-positive neurons in the thalamus, dentate and spinal cord.

[1712] Together, these data demonstrate that variant AAV capsids, including TTD-001, can achieve a large improvement of their therapeutic index by retaining strong efficacy at low dose.

The application's sequence listing, which the Patent Office published only in electronic form, follows.

SEQUENCE LISTING (5447 sequences)

SEQ ID NO: 1 - protein, 114 aa, synthetic construct
EVQMVESGGGLVQPGGSLTLSCAASGFTFSSYRMNWVRQAPGKGLEWVSYISSSRSAIYYADSVKGRFTISRDNAKNSLYLQMNSLRDEDTAVYYCATLGIGYWGQGTLVTVSS

SEQ ID NO: 2 - protein, 114 aa, synthetic construct
EVQLVESGGGLVQPGGSLRLSCAASGFTFSSYSMNWVRQAPGKGLEWVSYISRSGSTIYYADSVEGRFTISRDNAYNSLYLQMISLRDDDTAVYYCARGNWAYWGQGILVTVSS

SEQ ID NO: 3 - protein, 114 aa, synthetic construct
EVQLVESGGGLVQPGGSLRLSCAASRFTFSNYNMNWVRQAPGKGLEWISYISSSSSTIYYADSVKGRFTISRDNAKNSLSLQMNSLRDEDTAVYYCASLGRGYWGQGTLVTVSS

SEQ ID NO: 4 - DNA, 2232 bp, synthetic construct
  source 1..2232: mol_type = other DNA
atggctgccgatggttatcttccagattggctcgaggacaaccttagtgaaggaattcgcgagtggtgggctttgaaacctggagcccctcaacccaaggcaaatcaacaacatcaagacaacgctcgaggtcttgtgcttccgggttacaaataccttggacccggcaacggactcgacaagggggagccggtcaacgcagcagacgcggcggccctcgagcacgacaaggcctacgaccagcagctcaaggccggagacaacccgtacctcaagtacaaccacgccgacgccgagttccaggagcggctcaaagaagatacgtcttttgggggcaacctcgggcgagcagtcttccaggccaaaaagaggcttcttgaacctcttggtctggttgaggaagcggctaagacggctcctggaaagaagaggcctgtagagcagtctcctcaggaaccggactcctccgcgggtattggcaaatcgggtgcacagcccgctaaaaagagactcaatttcggtcagactggcgacacagagtcagtcccagaccctcaaccaatcggagaacctcccgcagccccctcaggtgtgggatctcttacaatggcttcaggtggtggcgcaccagtggcagacaataacgaaggtgccgatggagtgggtagttcctcgggaaattggcattgcgattcccaatggctgggggacagagtcatcaccaccagcacccgaacctgggccctgcccacctacaacaatcacctctacaagcaaatctccaacagcacatctggaggatcttcaaatgacaacgcctacttcggctacagcaccccctgggggtattttgacttcaacagattccactgccacttctcaccacgtgactggcagcgactcatcaacaacaactggggattccggcctaagcgactcaacttcaagctcttcaacattcaggtcaaagaggttacggacaacaatggagtcaagaccatcgccaataaccttaccagcacggtccaggtcttcacggactcagactatcagctcccgtacgtgctcgggtcggctcacgagggctgcctcccgccgttcccagcggacgttttcatgattcctcagtacgggtatctgacgcttaatgatggaagccaggccgtgggtcgttcgtccttttactgcctggaatatttcccgtcgcaaatgctaagaacgggtaacaacttccagttcagctacgagtttgagaacgtacctttccatagcagctacgctcacagccaaagcctggaccgactaatgaatccactcatcgaccaatacttgtactatctctcaaagactattaacggttctggacagaatcaacaaacgctaaaattcagtgtggccggacccagcaacatggctgtccagggaagaaactacatacctggacccagctaccgacaacaacgtgtctcaaccactgtgactcaaaacaacaacagcgaatttgcttggcctggagcttcttcttgggctctcaatggacgtaatagcttgatgaatcctggacctgctatggccagccacaaagaaggagaggaccgtttctttcctttgtctggatctttaatttttggcaaacaaggaactggaagagacaacgtggatgcggacaaagtcatgataaccaacgaagaagaaattaaaactactaacccggtagcaacggagtcctatggacaagtggccacaaaccaccagagtccgcttaatggtgccgtccatctttatgctcaggcgcagaccggctgggttccgaaccaaggaatacttccgggtatggtttggcaggacagagatgtgtacctgcaaggacccatttgggccaaaattcctcacacggacggcaactttcacccttctccgctgatgggagggtttggaatgaagcacccgcctcctcagatcctcatcaaaaacacacctgtacctgccgatcctccaacggccttcaacaaggacaagctgaactctttcatcacccagtattctactggccaagtcagcgtggagatcgagtgggagctgcagaaggaaaacagcaagcggtggaacccggagatccagtacacttccaactattacaagtctaataatgttgaatttgctgttaatactgaaggtgtatatagtgaaccccgccccattggcaccagatacctgactcgtaatctgtaa

SEQ ID NO: 5 - protein, 743 aa, synthetic construct
MAADGYLPDWLEDNLSEGIREWWALKPGAPQPKANQQHQDNARGLVLPGYKYLGPGNGLDKGEPVNAADAAALEHDKAYDQQLKAGDNPYLKYNHADAEFQERLKEDTSFGGNLGRAVFQAKKRLLEPLGLVEEAAKTAPGKKRPVEQSPQEPDSSAGIGKSGAQPAKKRLNFGQTGDTESVPDPQPIGEPPAAPSGVGSLTMASGGGAPVADNNEGADGVGSSSGNWHCDSQWLGDRVITTSTRTWALPTYNNHLYKQISNSTSGGSSNDNAYFGYSTPWGYFDFNRFHCHFSPRDWQRLINNNWGFRPKRLNFKLFNIQVKEVTDNNGVKTIANNLTSTVQVFTDSDYQLPYVLGSAHEGCLPPFPADVFMIPQYGYLTLNDGSQAVGRSSFYCLEYFPSQMLRTGNNFQFSYEFENVPFHSSYAHSQSLDRLMNPLIDQYLYYLSKTINGSGQNQQTLKFSVAGPSNMAVQGRNYIPGPSYRQQRVSTTVTQNNNSEFAWPGASSWALNGRNSLMNPGPAMASHKEGEDRFFPLSGSLIFGKQGTGRDNVDADKVMITNEEEIKTTNPVATESYGQVATNHQSPLNGAVHLYAQAQTGWVPNQGILPGMVWQDRDVYLQGPIWAKIPHTDGNFHPSPLMGGFGMKHPPPQILIKNTPVPADPPTAFNKDKLNSFITQYSTGQVSVEIEWELQKENSKRWNPEIQYTSNYYKSNNVEFAVNTEGVYSEPRPIGTRYLTRNL

SEQ ID NO: 6 - DNA, 57 bp, synthetic construct
  source 1..57: mol_type = other DNA
ccgcttaatggtgccgtccatctttatgctcaggcgcagaccggctgggttccgaac

SEQ ID NO: 7 - DNA, 2232 bp, synthetic construct
  source 1..2232: mol_type = other DNA
atggctgccgatggttatcttccagattggctcgaggacaaccttagtgaaggaattcgcgagtggtgggctttgaaacctggagcccctcaacccaaggcaaatcaacaacatcaagacaacgctcgaggtcttgtgcttccgggttacaaataccttggacccggcaacggactcgacaagggggagccggtcaacgcagcagacgcggcggccctcgagcacgacaaggcctacgaccagcagctcaaggccggagacaacccgtacctcaagtacaaccacgccgacgccgagttccaggagcggctcaaagaagatacgtcttttgggggcaacctcgggcgagcagtcttccaggccaaaaagaggcttcttgaacctcttggtctggttgaggaagcggctaagacggctcctggaaagaagaggcctgtagagcagtctcctcaggaaccggactcctccgcgggtattggcaaatcgggtgcacagcccgctaaaaagagactcaatttcggtcagactggcgacacagagtcagtcccagaccctcaaccaatcggagaacctcccgcagccccctcaggtgtgggatctcttacaatggcttcaggtggtggcgcaccagtggcagacaataacgaaggtgccgatggagtgggtagttcctcgggaaattggcattgcgattcccaatggctgggggacagagtcatcaccaccagcacccgaacctgggccctgcccacctacaacaatcacctctacaagcaaatctccaacagcacatctggaggatcttcaaatgacaacgcctacttcggctacagcaccccctgggggtattttgacttcaacagattccactgccacttctcaccacgtgactggcagcgactcatcaacaacaactggggattccggcctaagcgactcaacttcaagctcttcaacattcaggtcaaagaggttacggacaacaatggagtcaagaccatcgccaataaccttaccagcacggtccaggtcttcacggactcagactatcagctcccgtacgtgctcgggtcggctcacgagggctgcctcccgccgttcccagcggacgttttcatgattcctcagtacgggtatctgacgcttaatgatggaagccaggccgtgggtcgttcgtccttttactgcctggaatatttcccgtcgcaaatgctaagaacgggtaacaacttccagttcagctacgagtttgagaacgtacctttccatagcagctacgctcacagccaaagcctggaccgactaatgaatccactcatcgaccaatacttgtactatctctcaaagactattaacggttctggacagaatcaacaaacgctaaaattcagtgtggccggacccagcaacatggctgtccagggaagaaactacatacctggacccagctaccgacaacaacgtgtctcaaccactgtgactcaaaacaacaacagcgaatttgcttggcctggagcttcttcttgggctctcaatggacgtaatagcttgatgaatcctggacctgctatggccagccacaaagaaggagaggaccgtttctttcctttgtctggatctttaatttttggcaaacaaggaactggaagagacaacgtggatgcggacaaagtcatgataaccaacgaagaagaaattaaaactactaacccggtagcaacggagtcctatggacaggtcgctacgaatcatcagtctccgctgaatggtgcggtgcatctgtatgcgcaggcgcagctgtctccggtgaagaatcaaggaatacttccgggtatggtttggcaggacagagatgtgtacctgcaaggacccatttgggccaaaattcctcacacggacggcaactttcacccttctccgctgatgggagggtttggaatgaagcacccgcctcctcagatcctcatcaaaaacacacctgtacctgccgatcctccaacggccttcaacaaggacaagctgaactctttcatcacccagtattctactggccaagtcagcgtggagatcgagtgggagctgcagaaggaaaacagcaagcggtggaacccggagatccagtacacttccaactattacaagtctaataatgttgaatttgctgttaatactgaaggtgtatatagtgaaccccgccccattggcaccagatacctgactcgtaatctgtaa

SEQ ID NO: 8 - protein, 743 aa, synthetic construct
MAADGYLPDWLEDNLSEGIREWWALKPGAPQPKANQQHQDNARGLVLPGYKYLGPGNGLDKGEPVNAADAAALEHDKAYDQQLKAGDNPYLKYNHADAEFQERLKEDTSFGGNLGRAVFQAKKRLLEPLGLVEEAAKTAPGKKRPVEQSPQEPDSSAGIGKSGAQPAKKRLNFGQTGDTESVPDPQPIGEPPAAPSGVGSLTMASGGGAPVADNNEGADGVGSSSGNWHCDSQWLGDRVITTSTRTWALPTYNNHLYKQISNSTSGGSSNDNAYFGYSTPWGYFDFNRFHCHFSPRDWQRLINNNWGFRPKRLNFKLFNIQVKEVTDNNGVKTIANNLTSTVQVFTDSDYQLPYVLGSAHEGCLPPFPADVFMIPQYGYLTLNDGSQAVGRSSFYCLEYFPSQMLRTGNNFQFSYEFENVPFHSSYAHSQSLDRLMNPLIDQYLYYLSKTINGSGQNQQTLKFSVAGPSNMAVQGRNYIPGPSYRQQRVSTTVTQNNNSEFAWPGASSWALNGRNSLMNPGPAMASHKEGEDRFFPLSGSLIFGKQGTGRDNVDADKVMITNEEEIKTTNPVATESYGQVATNHQSPLNGAVHLYAQAQLSPVKNQGILPGMVWQDRDVYLQGPIWAKIPHTDGNFHPSPLMGGFGMKHPPPQILIKNTPVPADPPTAFNKDKLNSFITQYSTGQVSVEIEWELQKENSKRWNPEIQYTSNYYKSNNVEFAVNTEGVYSEPRPIGTRYLTRNL

SEQ ID NO: 9 - DNA, 57 bp, synthetic construct
  source 1..57: mol_type = other DNA
ccgctgaatggtgcggtgcatctgtatgcgcaggcgcagctgtctccggtgaagaat

SEQ ID NO: 10 - protein, 115 aa, synthetic construct
EVQLVESGGGLVKPGGSLRLSCAASGFTFSTYSMNWVRQAPGKGLEWVSSISSGSSYIYYADSVKGRFTISRDNAKNSLYLQMNSLRAEDTAVYYCTVTTHFHHWGQGTLVTVSS

SEQ ID NO: 11 - protein, 121 aa, synthetic construct
QVQLQESGPGLVKPSETLSLTCTVSGGSISNYYWSWIRQPAGKGLEWIGRIYTSGDTYYNPSLQSRVTMSVDTSKNQFSLKLSAVTAADTAVYYCARAGIVGTPGLGMDVWGQGTTVTVSS

SEQ ID NO: 12 - protein, 114 aa, synthetic construct
EVQLVESGGGLVQPGGSLRLSCAASGFTFSSYNMNWVRQAPGKGLEWISYISSSSNTIYYADSVKGRFTVSRDNAKNSLYLQMNSLRDEDTAVYYCATLGRGYWGQGTLVIASS

SEQ ID NO: 13 - protein, 115 aa, synthetic construct
QVQLQESGPGLVKPSETLSLTCTVSGGSISSYYWTWIRQPAGKGLEWIGRIDTSGSTNYNPSLKSRVTMSIDTSKKQFSLKLSSVTAADTAVYYCARGGDGYRYWGQGTLVTVSS

SEQ ID NO: 14 - protein, 115 aa, synthetic construct
EVQLVESGGGLVQPGGSLRLSCAASGFTFSSYSMNWVRQAPGKGLEWISYISSSNSTIKYADSVKGRFTISRDNAKNSLYLQMNSLRDEDTAVYYCARRSLGDYWGQGTLVIVSS

SEQ ID NO: 15 - protein, 117 aa, synthetic construct
EVQLVESGGGLVKPGGSLRLSCAASGFTFSNAWMSWVRQAPGKGLEWFGRIKSKTDGGTTDYAAPVKGRFTISRDDSKNTLYLQMNSLKTEDTAVYYCVTDYPKDVWGQGTTVTVSS

SEQ ID NO: 16 - protein, 126 aa, synthetic construct
EVQLVESGGGLVQPGGSLRLSCAASGFTFNNYDMHWVRQAAGKGLEWVSTIGAAGDTYYPGSVKGRFIISRENAKNSLYLQMNSLRAGDTAVYYCARAGETLEGATIGYYYGMDVWGQGTTVTVSS

SEQ ID NO: 17 - protein, 114 aa, synthetic construct
QVQLVQSGAEVKKPGASVKVSCKASGYTFTGYYMHWVRQAPGQGLEWMGWINPNSGGTNYAQKFQGRVTMTRDTSISTAYMELSRLRSDDTAVYYCAGDAFDIWGQGTMVTVSS

SEQ ID NO: 18 - protein, 122 aa, synthetic construct
QVTLKESGPVLVKPTETLTLTCTVSGFSLINARMAVSWIRQPPGKALEWLAHIFSNDEKSYSTSLKSRLTISKDTSKSQVVLIMTNMDPVDTATYYCARIRGYSYNYGMDVWGQGTTVTVSS

SEQ ID NO: 19 - protein, 112 aa, synthetic construct
DIVMTQTPLSSPVTLGQPASISCRSSQSLVHSDGNTYLSWLQQRPGQPPRLLIYKISNRFSGVPDRFSGSGAGTDFTLKITRVEAEDVGIYYCMQVTQFPRTFGQGTKVEIR

SEQ ID NO: 20 - protein, 111 aa, synthetic construct
QSVLTQPPSVSGAPGQRVTISCTGSSSNIGAGYDVHWYQQLPGTAPKLLIYGNSNRPSGVPDRFSGSKSGTSASLAITGLQAEDETDFYCQSYDSSLSGSVFGGGTKLTVL

SEQ ID NO: 21 - protein, 112 aa, synthetic construct
DIVMTQTPLSSPVTLGQPASISCRSSQSLVHSDGNTYLSWLQQRPGQPPRLLIYKISNRFSGVPDRFSGSGAGTDFTLKISRVEAEDVGVYYCMQATQFPRTFGQGSKLEIK

SEQ ID NO: 22 - protein, 107 aa, synthetic construct
EIVLTQSPATLSLSPGERATLSCRASQSVSDYLAWYQQKPGQAPRLFIYDVSKRATGIPARFSGSGSGTDFTLTISSLEPEDFAVYYCQQRSNWPLTFGGGTKVEIK

SEQ ID NO: 23 - protein, 107 aa, synthetic construct
EIVLTQSPATLSSSPGERATLSCRASQSVTSYLNWYQQKPGQAPRLLIYDASNRATGIPARFSGSGSGTDFTLTISSLEPEDFALYYCQQRSNWPYTFGQGTKLEIK

SEQ ID NO: 24 - protein, 112 aa, synthetic construct
DIVMTQTPLSSPVTLGQPASISCRSSQSLVHSDGNTYLSWLQQRPGQPPRLLIYKISKRFSGVPDRFSGSGAGTDFTLKISRVEAEDVGVYYCMQATQFPRTFGQGTRLEIK

SEQ ID NO: 25 - protein, 112 aa, synthetic construct
DIVMTQTPLSSLVTLGQPASISCRSSQSLVHSDGNTYLSWLQQRPGQPPRLLIYKISKRFFGVPDRFSGSGAGTDFTLKINRVEAEDVGIYYCMQATQFPLTFGGGTKVEIK

SEQ ID NO: 26 - protein, 108 aa, synthetic construct
SYVLTQPPSVSVAPGQTARITCGGNNIGSKSVHWYQQKPGQAPVLVVYDDSDRPSGIPERFSGSNSGNTATLTISRVEAGDEADYYCQVWDSSSDPVVFGGGTMLTVL

SEQ ID NO: 27 - protein, 107 aa, synthetic construct
SYELTQPPSVSVSPGQTARITCSGDALPKQYAYWYQQKPGQAPVLVIFKDTERPSGIPERFSGSSSGTTVTLTISGVQAEDEADYYCQSADSSGSYVFGTGTKVTVL

SEQ ID NO: 28 - protein, 112 aa, synthetic construct
DVVMTQSPLSLPVTLGQPASISCRSSQSLVYSDGNTYLNWFQQRPGQSPRRLIYKVSNRDSGVPDRFSGSGSGTDFTLKISRVEAEDVGVYYCMQGTHWPLTFGQGTRLEIK

SEQ ID NO: 29 - protein, 115 aa, synthetic construct
QAVLTQPSSLSASPGASARLTCTLRSGINVGAYRLYWYQQKPGSPPQYLLRYKSDSDKQQGSGVPSRFSGSKDASANAGILLISGLQSEDEADYYCMIWHSSAWVFGGGTKLTVL

SEQ ID NO: 30 - protein, 108 aa, synthetic construct
SYELTQPPSVSVSPGQTARITCSGEALPKQYAYWYQQKPGQAPVLVIYKDSERPSGIPERFSGSSSGTTVTLTISGVQAEDEADYYCQSADSSGTYRVFGGGTKLTVL

SEQ ID NO: 31 - protein, 112 aa, synthetic construct
DVVMTQTPLSSPVTLGQPASISCRSSQSLVHSDGNTYLSWLQQRPGQPPRLLIYKISNRFSGVPDRFSGSGAGTDFTLKISRVEAEDVGVYYCMQATQFPRTFGQGTKLEIK

SEQ ID NO: 32 - protein, 107 aa, synthetic construct
SYELTQPPSVSVSPGQTARITCSGDALPKQYACWYQQKPGQAPVLVIYKDSERPSGIPERFSGSSSGTTVTLTITGVQAEDEADYYCQSTDSSGSWVFGGGTKLTVL

SEQ ID NO: 33 - protein, 107 aa, synthetic construct
EIVLTQSPATLSLSPGERATLSCRASQSVSSYLAWYLQKPGQAPRLLIYDVSNRATGIPARFSGSGSGTDFTLTISRLEPEDFAVYYCQQRRNWPYTFGQGTKLEIK

SEQ ID NO: 34 - protein, 107 aa, synthetic construct
DIQLTQSPSFLSASVGDRVTITCRASQGISCSLAWYQQKPGKAPKLLIYAASTLQSGVPSRFSGSGSGTEFTLTISSLQPEDFATYYCQQFNSYPFTFGPGTKVDIK

SEQ ID NO: 35 - protein, 113 aa, synthetic construct
DIVMTQSPDSLAVSLGERATINCKSSQSVLYSSKNKNYLAWYQQKPGQPPKLLIYWASTRESGVPDRFSGSGSGTDFTLAISSLQAEDVAVYYCQQYYSSPYTFGQGTKLEIK

SEQ ID NO: 36 - protein, 112 aa, synthetic construct
DILMTQSPLSLPVTPGEPASISCRSSQSLLHSNGYNYLDWYLQKPGQSPQLLIYLGSNRASGVPDRFSGSGSGTDFTLKFSRVEAEDVGLYYCMQALQIPLTFGGGTKVEIK

SEQ ID NO: 37 - protein, 113 aa, synthetic construct
DIVMTQSPDSLAVSLGERATINCKSSQSVLYSSNNKNYLAWYQQKPGQPPKLLIYWASTRESGVPDRFSGSGSGTDFTLTISSLQAEDVAVYYCQQYYSTPLTFGGGTKVEIK

SEQ ID NO: 38 - protein, 112 aa, synthetic construct
DIVMTQSPLSLPVIPGEPASISCRSSQSLLHSNGYIYLDWYLQKPGQSPQLLIYVGSNRASGVPDRFSGSGSGTDFKLKISRVEAEDVGVYYCMQTLQIPRTFGGGTKVEIK

SEQ ID NO: 39 - DNA, 342 bp, synthetic construct
  source 1..342: mol_type = other DNA
gaggtgcagatggtggagtctgggggaggcttggtacagcctggggggtccctgacactctcctgtgcagcctctggattcaccttcagtagctatagaatgaactgggtccgccaggctccagggaaggggctggagtgggtttcatacattagcagtagtagaagtgccatatactacgcagactctgtgaagggccgattcaccatctccagagacaatgccaagaactcactgtatctgcaaatgaacagcctgagagacgaggacacggctgtgtattactgtgcgaccctggggataggctactggggccagggaaccctggtcaccgtctcctca

SEQ ID NO: 40 - DNA, 366 bp, synthetic construct
  source 1..366: mol_type = other DNA
caggtcaccttgaaggagtctggtcctgtgctggtgaaacccacagagaccctcacgctgacctgcaccgtctctgggttctcactcatcaatgctagaatggctgtgagctggatccgtcagcccccagggaaggccctggagtggcttgcacacattttttcgaatgacgaaaaatcctacagcacatctctgaagagcagactcaccatctccaaggacacctccaaaagccaggtggtccttatcatgaccaacatggaccctgtggacacagccacatattactgtgcacggatccgtggatacagctataactacggtatggacgtctggggccaagggaccacggtcaccgtctcctca

SEQ ID NO: 41 - DNA, 345 bp, synthetic construct
  source 1..345: mol_type = other DNA
gaggtgcagttggtggagtctgggggaggcttggtacagcctggggggtccctgagactctcctgtgcagcctctggattcaccttcagtagctatagcatgaactgggtccgccaggctccagggaaggggctggagtgggtttcatacattaggagtagtagtagtaccatatactacgcagactctgtgaagggccgattcaccatctccagagacaatgccaagaaatcattgtatctgcaaatgaatagtctgagagacgaggacacggctgtgtattactgtgcgagaaggagtatagctgactactggggccagggaaccctggtcaccgtctcctca

SEQ ID NO: 42 - DNA, 378 bp, synthetic construct
  source 1..378: mol_type = other DNA
gaggtgcagctggtggagtctgggggaggcttggtacagcctggggggtccctgagactctcctgtgcagcctctggattcaccttcaataactacgacatgcactgggtccgccaagctgcaggaaaaggtctggagtgggtctcaactattggtgctgctggtgacacatattatccaggctccgtgaagggccgattcatcatctccagagaaaatgccaagaactccttgtatcttcaaatgaacagcctgagagccggggacacggctgtgtattactgtgcaagagccggagagaccttagagggagctactatcggctactactacggtatggacgtctggggccaggggaccacggtcaccgtctcctca

SEQ ID NO: 43 - DNA, 351 bp, synthetic construct
  source 1..351: mol_type = other DNA
gaggtgcagctggtggagtctgggggaggcttggtaaagcctggggggtcccttagactctcctgtgcagcctctggattcactttcagtaacgcctggatgagctgggtccgccaggctccagggaaggggctggagtggtttggccgtattaaaagcaaaactgatggtgggacaacagactacgctgcacccgtgaaaggcagattcaccatctcaagagatgactcaaaaaacacgctgtatctgcaaatgaacagcctgaaaaccgaggacacagccgtgtattactgtgtcacagattacccgaaggacgtctggggccaagggaccacggtcaccgtctcctca

SEQ ID NO: 44 - DNA, 345 bp, synthetic construct
  source 1..345: mol_type = other DNA
gaggtgcagctggtggagtctgggggaggcttggtacagcctggggggtccctgagactctcctgtgcagcctctggattcaccttcagtagctatagcatgaactgggtccgccaggctccagggaaggggctggagtggatttcatacattagtagtagtaatagtaccataaagtacgcagactctgtgaagggccgattcaccatctccagagacaatgccaagaactcactgtatctgcaaatgaacagcctgagagacgaggacacggctgtgtattactgtgcgagaaggagtctaggtgactactggggccagggaaccctggtcatcgtctcctca

SEQ ID NO: 45 - DNA, 345 bp, synthetic construct
  source 1..345: mol_type = other DNA
caggtgcagctgcaggagtcgggcccaggactggtgaagccttcggagaccctgtccctcacctgcactgtctctggtggctccatcagtagttactactggacctggatccggcagcccgccgggaagggactggagtggattgggcgtatcgataccagtgggagcaccaactacaacccctccctcaagagtcgagtcaccatgtcaatagacacgtccaagaaacagttctccctgaagctgagctctgtgaccgccgcggacacggccgtgtattactgtgcgagagggggagatggctaccgctactggggccagggaaccctggtcaccgtctcctca

SEQ ID NO: 46 - DNA, 342 bp, synthetic construct
  source 1..342: mol_type = other DNA
gaggtgcaactggtggagtctgggggaggcttggtacagcctggggggtccctgagactctcctgtgcagcctctggattcaccttcagtagctataacatgaactgggttcgccaggctccagggaaggggctggagtggatttcatacattagtagtagtagtaataccatatactacgcagactctgtgaagggccgattcaccgtctccagggacaatgccaagaactcactgtatctgcaaatgaacagcctgagagacgaggacacggctgtgtattactgtgcgactctggggaggggctactggggccagggaaccctggtcatcgcctcctca

SEQ ID NO: 47 - DNA, 363 bp, synthetic construct
  source 1..363: mol_type = other DNA
caggtgcagctgcaggagtcgggcccaggactggtgaagccttcggagaccctgtccctcacctgcactgtctctggtggctccatcagtaattactactggagttggatccggcagcccgccgggaagggtctggagtggattgggcgtatctataccagtggggacacctactacaacccctccctccagagtcgagtcaccatgtcagtagacacgtccaagaaccagttctccctgaagctgagcgctgtgaccgccgcggacacggccgtctattactgtgcgagagcgggtatagtgggaactccgggactcggtatggacgtctggggccaagggaccacggtcaccgtctcctca

SEQ ID NO: 48 - DNA, 345 bp, synthetic construct
  source 1..345: mol_type = other DNA
gaggtgcagctggtggagtctgggggaggcctggtcaagcctggggggtccctgagactctcctgtgcagcctctggattcaccttcagtacctatagcatgaactgggtccgccaggctccagggaaggggctggagtgggtctcatccattagtagtggtagtagttacatatactacgcagactcagtgaagggccgattcaccatctccagagacaacgccaagaactcactgtatctgcaaatgaacagcctgagagccgaggacacggctgtgtattactgtacagtaactacacacttccaccactggggccagggcaccctggtcaccgtctcctca

SEQ ID NO: 49 - DNA, 357 bp, synthetic construct
  source 1..357: mol_type = other DNA
cagatcaccttaaaggagtctggtcctacgctggtgaaacccacacagaccctcacgctgacctgcaccctctctgggttctcactcagcactagtgaagtgggtgtgggctggatccgtcagcccccaggaaaggccctggagtggcttgcaatcatttattggaatgatcataagcgctacagcccatctctgaagaacaggctcaccttcaccaaggacacctccaaaaaccaggtggtccttacaatgaccaacatggaccctgtggacacagccacatattattgtgcacgcagagtaactggggaggggttcgacccctggggccagggaaccctggtcaccgtctcctca

SEQ ID NO: 50 - DNA, 354 bp, synthetic construct
  source 1..354: mol_type = other DNA
gaggtgcagctgttggagtctgggggaggcttggtacagccgggggggtccctgagactctcctgtgcagcctcgggattcacctatagcagctatgccatgagctgggtccgccgggctccagggaaggggctggagtggatctcaattattagtggtagtagtagtatcacatactacgcagactccatgaagggccggttcactatctctagagacaattccaagaacacgctttttctgcaaatgaatagcctgagagccgaggacacggccgtttattactgtgcgaagggggggaggtacgggtacttccaacactggggccagggcaccctggtcaccgtctcctca

SEQ ID NO: 51 - DNA, 342 bp, synthetic construct
  source 1..342: mol_type = other DNA
caggtgcagctgcaggagtcgggcccaggactggtgaagccttcggagaccctgtccctcacctgcactgtctctggtggctccatcagtaattactactggacctggatccggcagcccgccgggaagggactggagtggattgggcgtgtctataccagtgggagcgccaactacaacccctccctcaagagtcgagttaccatgtcagtagacacgtccaagaaccagttctccctgacgctgagctctgtgaccgccgcggacacggccgtgtattactgtgcgagagatagaggactctactactggggccagggaaccctggtcaccgtctcctca

SEQ ID NO: 52 - DNA, 345 bp, synthetic construct
  source 1..345: mol_type = other DNA
gaggtgcagctggtggagtctgggggaggcttggtacagcctggggggtccctgagactctcctgtgcagcctctggattcaccttcagtagttataccatgaactgggtccgccaggctccagggaaggggctggagtgggtttcatacattagtagtagtagtagtaccatatactacgcagactctgtgaagggccgattcaccatctccagagacaatgccaagaactcactgtatctgcaaatgaacagcctgagagacgaggacacggctgtgtattactgtgcgagtctggggagaggggactgctggggccagggaaccctggtcaccgtctcctca

SEQ ID NO: 53 - DNA, 342 bp, synthetic construct
  source 1..342: mol_type = other DNA
caggtgcagctggtgcagtctggggctgaggtgaagaagcctggggcctcagtgaaggtctcctgcaaggcttctggatacaccttcaccggctactatatgcactgggtgcgacaggcccctggacaagggcttgagtggatgggatggatcaaccctaacagtggtggcacaaactatgcacagaagtttcagggcagggtcaccatgaccagggacacgtccatcagcacagcctacatggagctgagcaggctgagatctgacgacacggccgtgtattactgtgctggggatgcttttgatatctggggccaagggacaatggtcaccgtctcttca

SEQ ID NO: 54 - DNA, 345 bp, synthetic construct
  source 1..345: mol_type = other DNA
gaggtgcagctggtggagtctgggggaggcttggtacaggctggggggtccctgagactctcctgtgcagcctctggattcaccttcagtgactatagcatgaactgggtccgccaggctccagggaaggggctggagtgggtttcatatattaggagtagtagtagtatcatatactacgcagactctgtgaagggccgattcaccatctccagagacaatgccaagaactcactgcatttgcaaatgaacagcctgagagacgaggacacggctgtgtattactgtgcgagacggggtcactttgactactggggccagggaaccctggtcaccgtctcctca

SEQ ID NO: 55 - DNA, 342 bp, synthetic construct
  source 1..342: mol_type = other DNA
gaggtgcagctggtggagtctgggggaggcttggtacagcctggggggtccctgagactctcctgtgcagcctctagattcaccttcagtaactataacatgaactgggtccgccaggctccagggaaggggctggagtggatttcatacattagtagtagtagtagtaccatatactacgcagactctgtgaagggccgattcaccatctccagagacaatgccaagaactcactgtctctgcaaatgaacagcctgagagacgaggacacggctgtgtattactgtgcgagtctggggaggggctactggggccagggaaccctggtcaccgtctcctca

SEQ ID NO: 56 - DNA, 342 bp, synthetic construct
  source 1..342: mol_type = other DNA
gaggtgcagctggtggagtctgggggaggcttggtacagcctggggggtccctgagactctcctgtgcagcctctggattcaccttcagtagctatagcatgaactgggtccgccaggctccagggaaggggctggagtgggtttcatacattagtcgtagtggtagtaccatatactacgcagactctgtggagggccgattcaccatctccagagacaatgcctacaactcactgtatctgcaaatgatcagcctgagagacgatgacacggctgtgtattactgtgcgagagggaactgggcctactggggccagggaatcctggtcaccgtctcctca

SEQ ID NO: 57 - DNA, 336 bp, synthetic construct
  source 1..336: mol_type = other DNA
gatattgtgatgacccagactccactctcctcacctgtcacccttggacagccggcctccatctcctgcaggtctagtcaaagcctcgtacacagtgatggaaacacctacttgagttggcttcagcagaggccaggccagcctccaagactcctaatttataagatttctaaccggttctctggggtcccagacagattcagtggcagtggggcagggacagatttcacactgaaaatcaccagggtggaggctgaggatgtcgggatttattactgcatgcaagttacacaatttcctcggacgttcggccaagggaccaaggtggaaatcaga

SEQ ID NO: 58 - DNA, 336 bp, synthetic construct
  source 1..336: mol_type = other DNA
gatattgtgatgactcagtctccactctccctgcccgtcatccctggagagccggcctccatctcctgcaggtctagtcagagcctcctgcatagtaatggatacatctatttggattggtacctgcagaagccagggcagtctccacagctcctgatctatgtgggttctaatcgggcctccggggtccctgacaggttcagtggcagtggatcaggcacagatttcaaactgaaaatcagcagagtggaggctgaggatgttggggtttattactgcatgcaaactctacaaattccgcgcactttcggcggagggaccaaggtggagatcaaa

SEQ ID NO: 59 - DNA, 321 bp, synthetic construct
  source 1..321: mol_type = other DNA
gaaattgtgttgacacagtctccagccaccctgtcttcgtctccaggggaaagagccaccctctcctgcagggccagtcagagtgttaccagctacttaaactggtaccaacagaaacctggccaggctcccaggctcctcatctatgatgcatccaacagggccactggcatcccagccaggttcagtggcagtgggtctgggacagacttcactctcaccatcagcagcctcgagcctgaagattttgcactttattactgtcagcagcgtagcaactggccgtacacttttggccaggggaccaaactggagatcaaa

SEQ ID NO: 60 - DNA, 336 bp, synthetic construct
  source 1..336: mol_type = other DNA
gatattctgatgactcagtctccactctccctgcccgtcacccctggagagccggcctccatctcctgcaggtctagtcagagcctcctgcatagtaatggatacaactatttggattggtacctgcagaagccagggcagtctccacagctcctgatctatttgggttctaatcgggcctccggggtccctgacaggttcagtggcagtggatcaggcacagattttacactgaaattcagcagagtggaggctgaggatgttggactttattactgcatgcaagctctacaaattccgctcactttcggcggagggaccaaggtggagatcaaa

SEQ ID NO: 61 - DNA, 339 bp, synthetic construct
  source 1..339: mol_type = other DNA
gacatcgtgatgacccagtctccagactccctggctgtgtctctgggcgagagggccaccatcaactgcaagtccagccagagtgttttatacagctccaaaaataagaactacttagcttggtaccagcagaaaccaggacagcctcctaagctgctcatttactgggcatctacccgggaatccggggtccctgaccgattcagtggcagcgggtctgggacagatttcactctcgccatcagcagcctgcaggctgaagatgtggcagtttattactgtcagcaatattatagtagtccgtacacttttggccaggggaccaagctggagatcaaa

SEQ ID NO: 62 - DNA, 321 bp, synthetic construct
  source 1..321: mol_type = other DNA
gaaattgtgttgacacagtctccagccaccctgtctttgtctccaggggaaagagccaccctctcctgcagggccagtcagagtgttagcagctacttagcctggtacctacagaaacctggccaggctcccaggctcctcatctatgatgtgtccaacagggccactggcatcccagccaggttcagtggcagtgggtctgggacagacttcactctcaccatcagcagactagagcctgaagattttgcagtttattactgtcagcagcgtcgcaactggccgtacacttttggccaggggaccaagctggagatcaaa

SEQ ID NO: 63 - DNA, 321 bp, synthetic construct
  source 1..321: mol_type = other DNA
gacatccagttgacccagtctccatccttcctgtctgcatctgtaggagacagagtcaccatcacttgccgggccagtcagggcattagctgttctttagcctggtatcagcaaaaaccagggaaagcccctaagctcctgatctatgctgcatccactttgcaaagtggggtcccatcaaggttcagcggcagtggatctgggacagaattcactctcacaatcagcagcctgcagcctgaagattttgcaacttattactgtcaacagtttaatagttacccattcactttcggccctgggaccaaagtggatatcaaa

SEQ ID NO: 64 - DNA, 321 bp, synthetic construct
  source 1..321: mol_type = other DNA
tcctatgagctgacacagccaccctcggtgtcagtgtccccaggacagacggccaggatcacctgctctggagatgcattgccaaagcaatatgcttgttggtaccagcagaagccaggccaggcccctgtgctggtgatatataaagacagtgagaggccctcagggatccctgagcgattctctggctccagctcagggacaacagtcacgttgaccatcactggagtccaggcagaagatgaggctgactattactgtcaatccacagacagcagtggttcttgggtgttcggcggagggaccaagctgaccgtccta

SEQ ID NO: 65 - DNA, 336 bp, synthetic construct
  source 1..336: mol_type = other DNA
gatgttgtgatgacccagactccactctcctcacctgtcacccttggacagccggcctccatctcctgcaggtctagtcaaagcctcgtacacagtgatggaaacacctacttgagttggcttcagcagaggccaggccagcctccaagactcctaatttataagatttctaaccggttctctggggtcccagacagattcagtggcagtggggcagggacagatttcacactgaaaatcagcagggtggaagctgaggatgtcggggtttattactgcatgcaagctacacaatttcctcgcacttttggccaggggaccaagctggagatcaaa

SEQ ID NO: 66 - DNA, 324 bp, synthetic construct
  source 1..324: mol_type = other DNA
tcctatgagctgacacagccaccctcggtgtcagtgtccccaggacagacggccaggatcacctgctctggagaagcattgccaaagcaatatgcttattggtaccagcagaagccaggccaggcccctgtgctggtgatatataaagacagtgagaggccctcagggatccctgagcgattctctggctccagctcagggacaacagtcacgttgaccatcagtggagtccaggcagaagatgaggctgactattactgtcaatcagcagacagcagtggtacttatcgggtgttcggcggagggaccaagctgaccgtccta

SEQ ID NO: 67 - DNA, 336 bp, synthetic construct
  source 1..336: mol_type = other DNA
gatgttgtgatgactcagtctccactctccctgcccgtcacccttggacagccggcctccatctcctgcaggtctagtcaaagcctcgtatacagtgatggaaacacctacttgaattggtttcagcagaggccaggccaatctccaaggcgcctaatttataaggtttctaaccgggactctggggtcccagacagattcagcggcagtgggtcaggcactgatttcacactaaaaatcagcagggtggaggctgaggatgttggggtttattactgcatgcaaggtacacactggcctctcaccttcggccaagggacacgactggagattaaa

SEQ ID NO: 68 - DNA, 345 bp, synthetic construct
  source 1..345: mol_type = other DNA
caggctgtgctgactcagccgtcttccctctctgcatctcctggagcatcagccagactcacctgcaccttgcgcagtggcatcaatgttggtgcctacaggctatactggtaccagcagaagccaggaagtcctccccagtatctcctgaggtacaaatcagactcagataagcagcagggctctggagtccccagccgcttctctggatccaaagatgcttcggccaatgcagggattttactcatctctgggctccagtctgaggatgaggctgactattactgtatgatttggcacagcagcgcttgggtgttcggcggagggaccaagctgaccgtccta

SEQ ID NO: 69 - DNA, 321 bp, synthetic construct
  source 1..321: mol_type = other DNA
tcctatgagctgacacagccaccctcggtgtcagtgtccccaggacagacggccaggatcacctgctctggagatgcattgccaaagcaatatgcttattggtaccagcagaagccaggccaggcccctgtgctggtgatatttaaagacactgagaggccctcagggatccctgagcgattctctggctccagctcagggacaacagtcacgttgaccatcagtggagtccaggcagaagatgaggctgactattactgtcaatcagcagacagcagtggttcttatgtcttcggaactgggaccaaggtcaccgtccta

SEQ ID NO: 70 - DNA, 324 bp, synthetic construct
  source 1..324: mol_type = other DNA
tcctatgtgctgactcagccaccctcggtgtcagtggccccaggacagacggccaggattacctgtgggggaaacaacattggaagtaaaagtgtgcactggtaccagcagaagccaggccaggcccctgtgctggtcgtctatgatgatagcgaccggccctcagggatccctgagcgattctctggctccaactctgggaacacggccaccctgaccatcagcagggtcgaagccggggatgaggccgactattactgtcaggtgtgggatagtagtagtgatcctgtggtattcggcggagggaccatgctgaccgtccta

SEQ ID NO: 71 - DNA, 336 bp, synthetic construct
  source 1..336: mol_type = other DNA
gatattgtgatgacccagactccactctcctcacttgtcacccttggacagccggcctccatctcctgcaggtctagtcaaagcctcgtacacagtgatggaaacacctatttgagttggcttcagcagaggccaggccagcctccaagactcctaatttataagatttctaagcggttctttggggtcccagacagattcagtggcagtggggcagggacagatttcacactgaaaatcaacagggtggaagctgaggatgtcgggatttattactgcatgcaagctacacaatttccgctcactttcggcggagggaccaaggtggagatcaaa

SEQ ID NO: 72 - DNA, 336 bp, synthetic construct
  source 1..336: mol_type = other DNA
gatattgtgatgacccagactccactctcctcacctgtcacccttggacagccggcctccatctcctgcaggtctagtcaaagcctcgtacacagtgatggaaacacctacttgagttggcttcagcagaggccaggccagcctccaagactcctaatttataagatttctaaacggttctctggggtcccagacagattcagtggcagtggggcagggacagatttcacactgaaaatcagcagggtggaagctgaggatgtcggggtttattactgcatgcaagctacacaatttcctcggaccttcggccaagggacacgactggagattaaa

SEQ ID NO: 73 - DNA, 339 bp, synthetic construct
  source 1..339: mol_type = other DNA
gacatcgtgatgacccagtctccagactccctggctgtgtctctgggcgagagggccaccatcaactgcaagtccagccagagtgttttatacagctccaacaataagaactacttagcttggtaccagcagaaaccaggacagcctcctaagctgctcatttactgggcatctacccgggaatccggggtccctgaccgattcagtggcagcgggtctgggacagatttcactctcaccatcagcagcctgcaggctgaagatgtggcagtttattactgtcagcaatattatagtactccgctcactttcggcggagggaccaaggtggagatcaaa

SEQ ID NO: 74 - DNA, 321 bp, synthetic construct
  source 1..321: mol_type = other DNA
gaaattgtgttgacacagtctccagccaccctgtctttgtctccaggggaaagagccaccctctcctgcagggccagtcagagtgttagcgactacttagcctggtaccaacagaaacctggccaggctcccaggctcttcatctatgatgtatccaagagggccactggcatcccagccaggttcagtggcagtgggtctgggacagacttcactctcaccatcagcagcctagagcctgaagattttgcagtttattactgtcagcagcgtagcaactggccgctcactttcggcggagggaccaaggtggagatcaaa

SEQ ID NO: 75 - DNA, 336 bp, synthetic construct
  source 1..336: mol_type = other DNA
gatattgtgatgacccagactccactctcctcacctgtcacccttggacagccggcctccatctcctgcaggtctagtcaaagcctcgtacacagtgatggaaacacctacttgagttggcttcagcagaggccaggccagcctccaagactcctaatttataagatttctaaccggttctctggggtcccagacagattcagtggcagtggggcagggacagatttcacactgaaaatcagcagggtggaagctgaggatgtcggggtttattattgtatgcaagctactcaatttcctcgcacttttggccaggggtccaagctggagatcaaa

SEQ ID NO: 76 - DNA, 333 bp, synthetic construct
  source 1..333: mol_type = other DNA
cagtctgtgctgacgcagccgccctcagtgtctggggccccagggcagagggtcaccatctcctgcactgggagcagctccaacatcggggcaggttatgatgtacactggtaccagcagcttccaggaacagcccccaaactcctcatctatggtaacagcaatcggccctcaggggtccctgaccgattctctggctccaagtctggcacctcagcctccctggccatcactgggctccaggctgaggatgagactgatttttactgccagtcctatgacagcagcctgagtggttcggttttcggcggagggaccaagctgaccgtcctg

SEQ ID NO: 77 - protein, 8 aa, synthetic construct
GFTFSSYR

SEQ ID NO: 78 - protein, 8 aa, synthetic construct
GFTFSSYS

SEQ ID NO: 79 - protein, 8 aa, synthetic construct
RFTFSNYN

SEQ ID NO: 80 - protein, 8 aa, synthetic construct
GFTFSDYS

SEQ ID NO: 81 - protein, 8 aa, synthetic construct
GFTFSSYT

SEQ ID NO: 82 - protein, 8 aa, synthetic construct
GGSISNYY

SEQ ID NO: 83 - protein, 8 aa, synthetic construct
GFTYSSYA

SEQ ID NO: 84 - protein, 10 aa, synthetic construct
GFSLSTSEVG

SEQ ID NO: 85 - protein, 8 aa, synthetic construct
GFTFSTYS

SEQ ID NO: 86 - protein, 8 aa, synthetic construct
GFTFSSYN

SEQ ID NO: 87 - protein, 8 aa, synthetic construct
GGSISSYY

SEQ ID NO: 88 - protein, 8 aa, synthetic construct
GFTFSNAW

SEQ ID NO: 89 - protein, 8 aa, synthetic construct
GFTFNNYD

SEQ ID NO: 90 - protein, 8 aa, synthetic construct
GYTFTGYY

SEQ ID NO: 91 - protein, 10 aa, synthetic construct
GFSLINARMA

SEQ ID NO: 92 - protein, 8 aa, synthetic construct
ISSSRSAI

SEQ ID NO: 93 - protein, 8 aa, synthetic construct
ISRSGSTI

SEQ ID NO: 94 - protein, 8 aa, synthetic construct
ISSSSSTI

SEQ ID NO: 95 - protein, 8 aa, synthetic construct
IRSSSSII

SEQ ID NO: 96 - protein, 8 aa, synthetic construct
IRSSSSTI

SEQ ID NO: 97 - protein, 7 aa, synthetic construct
VYTSGSA

SEQ ID NO: 98 - protein, 8 aa, synthetic construct
ISGSSSIT

SEQ ID NO: 99 - protein, 7 aa, synthetic construct
IYWNDHK

SEQ ID NO: 100 - protein, 8 aa, synthetic construct
ISSGSSYI

SEQ ID NO: 101 - protein, 7 aa, synthetic construct
IYTSGDT

SEQ ID NO: 102 - protein, 8 aa, synthetic construct
ISSSSNTI

SEQ ID NO: 103 - protein, 7 aa, synthetic construct
IDTSGST

SEQ ID NO: 104 - protein, 8 aa, synthetic construct
ISSSNSTI

SEQ ID NO: 105 - protein, 10 aa, synthetic construct
IKSKTDGGTT

SEQ ID NO: 106 - protein, 7 aa, synthetic construct
IGAAGDT

SEQ ID NO: 107 - protein, 8 aa, synthetic construct
INPNSGGT

SEQ ID NO: 108 - protein, 7 aa, synthetic construct
IFSNDEK

SEQ ID NO: 109 - protein, 7 aa, synthetic construct
ATLGIGY

SEQ ID NO: 110 - protein, 7 aa, synthetic construct
ARGNWAY

SEQ ID NO: 111 - protein, 7 aa, synthetic construct
ASLGRGY

SEQ ID NO: 112 - protein, 8 aa, synthetic construct
ARRGHFDY

SEQ ID NO: 113 - protein, 8 aa, synthetic construct
ARRSIADY

SEQ ID NO: 114 - protein, 8 aa, synthetic construct
ASLGRGDC

SEQ ID NO: 115 - protein, 8 aa, synthetic construct
ARDRGLYY

SEQ ID NO: 116 - protein, 11 aa, synthetic construct
AKGGRYGYFQH

SEQ ID NO: 117 - protein, 11 aa, synthetic construct
ARRVTGEGFDP

SEQ ID NO: 118 - protein, 8 aa, synthetic construct
TVTTHFHH

SEQ ID NO: 119 - protein, 15 aa, synthetic construct
ARAGIVGTPGLGMDV

SEQ ID NO: 120 - protein, 7 aa, synthetic construct
ATLGRGY

SEQ ID NO: 121 - protein, 9 aa, synthetic construct
ARGGDGYRY

SEQ ID NO: 122 - protein, 8 aa, synthetic construct
ARRSLGDY

SEQ ID NO: 123 - protein, 8 aa, synthetic construct
VTDYPKDV

SEQ ID NO: 124 - protein, 20 aa, synthetic construct
ARAGETLEGATIGYYYGMDV

SEQ ID NO: 125 - protein, 7 aa, synthetic construct
AGDAFDI

SEQ ID NO: 126 - protein, 14 aa, synthetic construct
ARIRGYSYNYGMDV

SEQ ID NO: 127 - protein, 11 aa, synthetic construct
QSLVHSDGNTY

SEQ ID NO: 128 - protein, 9 aa, synthetic construct
SSNIGAGYD

SEQ ID NO: 129 - protein, 6 aa, synthetic construct
QSVSDY

SEQ ID NO: 130 - protein, 6 aa, synthetic construct
QSVTSY

SEQ ID NO: 131 - protein, 6 aa, synthetic construct
NIGSKS

SEQ ID NO: 132 - protein, 6 aa, synthetic construct
ALPKQY

SEQ ID NO: 133 - protein, 11 aa, synthetic construct
QSLVYSDGNTY

SEQ ID NO: 134 - protein, 9 aa, synthetic construct
SGINVGAYR

SEQ ID NO: 135 - protein, 6 aa, synthetic construct
QSVSSY

SEQ ID NO: 136 - protein, 6 aa, synthetic construct
QGISCS

SEQ ID NO: 137 - DNA, 2211 bp, Adeno-associated virus 9
  source 1..2211: mol_type = genomic DNA
atggctgccgatggttatcttccagattggctcgaggacaaccttagtgaaggaattcgcgagtggtgggctttgaaacctggagcccctcaacccaaggcaaatcaacaacatcaagacaacgctcgaggtcttgtgcttccgggttacaaataccttggacccggcaacggactcgacaagggggagccggtcaacgcagcagacgcggcggccctcgagcacgacaaggcctacgaccagcagctcaaggccggagacaacccgtacctcaagtacaaccacgccgacgccgagttccaggagcggctcaaagaagatacgtcttttgggggcaacctcgggcgagcagtcttccaggccaaaaagaggcttcttgaacctcttggtctggttgaggaagcggctaagacggctcctggaaagaagaggcctgtagagcagtctcctcaggaaccggactcctccgcgggtattggcaaatcgggtgcacagcccgctaaaaagagactcaatttcggtcagactggcgacacagagtcagtcccagaccctcaaccaatcggagaacctcccgcagccccctcaggtgtgggatctcttacaatggcttcaggtggtggcgcaccagtggcagacaataacgaaggtgccgatggagtgggtagttcctcgggaaattggcattgcgattcccaatggctgggggacagagtcatcaccaccagcacccgaacctgggccctgcccacctacaacaatcacctctacaagcaaatctccaacagcacatctggaggatcttcaaatgacaacgcctacttcggctacagcaccccctgggggtattttgacttcaacagattccactgccacttctcaccacgtgactggcagcgactcatcaacaacaactggggattccggcctaagcgactcaacttcaagctcttcaacattcaggtcaaagaggttacggacaacaatggagtcaagaccatcgccaataaccttaccagcacggtccaggtcttcacggactcagactatcagctcccgtacgtgctcgggtcggctcacgagggctgcctcccgccgttcccagcggacgttttcatgattcctcagtacgggtatctgacgcttaatgatggaagccaggccgtgggtcgttcgtccttttactgcctggaatatttcccgtcgcaaatgctaagaacgggtaacaacttccagttcagctacgagtttgagaacgtacctttccatagcagctacgctcacagccaaagcctggaccgactaatgaatccactcatcgaccaatacttgtactatctctcaaagactattaacggttctggacagaatcaacaaacgctaaaattcagtgtggccggacccagcaacatggctgtccagggaagaaactacatacctggacccagctaccgacaacaacgtgtctcaaccactgtgactcaaaacaacaacagcgaatttgcttggcctggagcttcttcttgggctctcaatggacgtaatagcttgatgaatcctggacctgctatggccagccacaaagaaggagaggaccgtttctttcctttgtctggatctttaatttttggcaaacaaggaactggaagagacaacgtggatgcggacaaagtcatgataaccaacgaagaagaaattaaaactactaacccggtagcaacggagtcctatggacaagtggccacaaaccaccagagtgcccaagcacaggcgcagaccggctgggttcaaaaccaaggaatacttccgggtatggtttggcaggacagagatgtgtacctgcaaggacccatttgggccaaaattcctcacacggacggcaactttcacccttctccgctgatgggagggtttggaatgaagcacccgcctcctcagatcctcatcaaaaacacacctgtacctgcggatcctccaacggccttcaacaaggacaagctgaactctttcatcacccagtattctactggccaagtcagcgtggagatcgagtgggagctgcagaaggaaaacagcaagcgctggaacccggagatccagtacacttccaactattacaagtctaataatgttgaatttgctgttaatactgaaggtgtatatagtgaaccccgccccattggcaccagatacctgactcgtaatctgtaa

SEQ ID NO: 138 - protein, 736 aa, Adeno-associated virus 9
MAADGYLPDWLEDNLSEGIREWWALKPGAPQPKANQQHQDNARGLVLPGYKYLGPGNGLDKGEPVNAADAAALEHDKAYDQQLKAGDNPYLKYNHADAEFQERLKEDTSFGGNLGRAVFQAKKRLLEPLGLVEEAAKTAPGKKRPVEQSPQEPDSSAGIGKSGAQPAKKRLNFGQTGDTESVPDPQPIGEPPAAPSGVGSLTMASGGGAPVADNNEGADGVGSSSGNWHCDSQWLGDRVITTSTRTWALPTYNNHLYKQISNSTSGGSSNDNAYFGYSTPWGYFDFNRFHCHFSPRDWQRLINNNWGFRPKRLNFKLFNIQVKEVTDNNGVKTIANNLTSTVQVFTDSDYQLPYVLGSAHEGCLPPFPADVFMIPQYGYLTLNDGSQAVGRSSFYCLEYFPSQMLRTGNNFQFSYEFENVPFHSSYAHSQSLDRLMNPLIDQYLYYLSKTINGSGQNQQTLKFSVAGPSNMAVQGRNYIPGPSYRQQRVSTTVTQNNNSEFAWPGASSWALNGRNSLMNPGPAMASHKEGEDRFFPLSGSLIFGKQGTGRDNVDADKVMITNEEEIKTTNPVATESYGQVATNHQSAQAQAQTGWVQNQGILPGMVWQDRDVYLQGPIWAKIPHTDGNFHPSPLMGGFGMKHPPPQILIKNTPVPADPPTAFNKDKLNSFITQYSTGQVSVEIEWELQKENSKRWNPEIQYTSNYYKSNNVEFAVNTEGVYSEPRPIGTRYLTRNL

SEQ ID NO: 139 - protein, 19 aa, synthetic construct
QLNGAVHLYAQAQLSPVQN

SEQ ID NO: 140 - protein, 19 aa, synthetic construct
PLDGAVHLYAQPQTGWVQN

SEQ ID NO: 141 - protein, 19 aa, synthetic construct
QLNGAVHLYAQAQTMSVQN

SEQ ID NO: 142 - protein, 19 aa, synthetic construct
PLDSSVHLYAQAQTGWVQN

SEQ ID NO: 143 - protein, 19 aa, synthetic construct
PLNGAVHLYAQAQTTKVQN

SEQ ID NO: 144 - protein, 19 aa, synthetic construct
PLDGAVHLYAQAQTGSVQN

SEQ ID NO: 145 - protein, 19 aa, synthetic construct
ALNGAVHLYAQAQTTSVQN

SEQ ID NO: 146 - protein, 19 aa, synthetic construct
PLNGSVHLYAQAQTMSVQN

SEQ ID NO: 147 - protein, 19 aa, synthetic construct
QLNGAVHLYAQAQTSPVQN

SEQ ID NO: 148 - protein, 19 aa, synthetic construct
PLNGAVHLYAQAQTMKVQN

SEQ ID NO: 149 - protein, 19 aa, synthetic construct
PLNGAVHLYAQAQVAQVQN

SEQ ID NO: 150 - protein, 19 aa, synthetic construct
PLDGAVHLYAQAQTGGVQN

SEQ ID NO: 151 - protein, 19 aa, synthetic construct
PLNGAVHLYAQAQTAWDQN

SEQ ID NO: 152 - protein, 19 aa, synthetic construct
PLNGSVHLYAQAQTGWDQN

SEQ ID NO: 153 - protein, 19 aa, synthetic construct
PLNGAVHLYAQAQTGSVQH

SEQ ID NO: 154 - protein, 19 aa, synthetic construct
PLNGAVHLYAQAQVKQVQN

SEQ ID NO: 155 - protein, 19 aa, synthetic construct
PLNGAVHLYAQAQSAPVQN

SEQ ID NO: 156 - protein, 19 aa, synthetic construct
PLNGAVHLYAQAQLSKVQN

SEQ ID NO: 157 - protein, 19 aa, synthetic construct
PLNGAVHLYAQAQLAPVQN

SEQ ID NO: 158 - protein, 19 aa, synthetic construct
PLNGAVHLYAQAQLAQVQN

SEQ ID NO: 159 - protein, 19 aa, synthetic construct
QLNGAVHLYAQAQVASVQN

SEQ ID NO: 160 - protein, 19 aa, synthetic construct
PLNGAVHLYAQAQTAKVQN

SEQ ID NO: 161 - protein, 19 aa, synthetic construct
PLNGAVHLYAQAQSAKVQN

SEQ ID NO: 162 - protein, 19 aa, synthetic construct
PLNGAVHLYAQAQTGCFQN

SEQ ID NO: 163 - protein, 19 aa, synthetic construct
PLNGAVHLYAQAQTQKVQN

SEQ ID NO: 164 - protein, 19 aa, synthetic construct
PLNGSVHLYAQAQTTSVQN

SEQ ID NO: 165 - protein, 19 aa, synthetic construct
PLNGGVHLYAQAQTGRVQN

SEQ ID NO: 166 - protein, 19 aa, synthetic construct
PLNGAVHLYAQAQTVAVQN

SEQ ID NO: 167 - protein, 19 aa, synthetic construct
ALNGAVHLYAQAQSSPVQN

SEQ ID NO: 168 - protein, 19 aa, synthetic construct
PLNGAVHLYAQAQLSPVQN

SEQ ID NO: 169 - protein, 19 aa, synthetic construct
QLNGAVHLYAQAQTTSVQN

SEQ ID NO: 170 - protein, 19 aa, synthetic construct
PLNGAVHLYAQAQTTQVQN

SEQ ID NO: 171 - protein, 19 aa, synthetic construct
PLNGAVHLYAQAQTAQVQN

SEQ ID NO: 172 - protein, 19 aa, synthetic construct
QLNGAVHLYAQAQTVAVQN

SEQ ID NO: 173 - protein, 19 aa, synthetic construct
PLNGAVHLYAQAQRIAVQN

SEQ ID NO: 174 - protein, 19 aa, synthetic construct
PLNGAVHLYAQAQRASVQN

SEQ ID NO: 175 - protein, 19 aa, synthetic construct
PLNGAVHLYAQAQTTPVQN

SEQ ID NO: 176 - protein, 19 aa, synthetic construct
QLNGAVHLYAQAQLASVQN

SEQ ID NO: 177 - protein, 19 aa, synthetic construct
PLNGAVHLYAQAQLTPVQN

SEQ ID NO: 178 - protein, 19 aa, synthetic construct
PLNGAVHLYAQAQSTPVQN

SEQ ID NO: 179 - protein, 19 aa, synthetic construct
PLNGAVHLYAQAQTSPVQN

SEQ ID NO: 180 - protein, 19 aa, synthetic construct
QLNGAVHLYAQAQVSQVQN

SEQ ID NO: 181 - protein, 19 aa, synthetic construct
PLNGAVHLYAQAQTMQVQN

SEQ ID NO: 182 - protein, 19 aa, synthetic construct
PLNGAVHLYAQAQTSKVQN

SEQ ID NO: 183 - protein, 19 aa, synthetic construct
SLNGAVHLYAQAQVSPVQN

SEQ ID NO: 184 - protein, 19 aa, synthetic construct
PLNGAVHLYAQAQVSQVQN

SEQ ID NO: 185 - protein, 19 aa, synthetic construct
PLNGAVHLYAQAQVSPVQN

SEQ ID NO: 186 - protein, 19 aa, synthetic construct
PLNGAVHLYAQAQTVQVQN

SEQ ID NO: 187 - protein, 19 aa, synthetic construct
PLNGAVHLYAQAQVTAVQN

SEQ ID NO: 188 - protein, 19 aa, synthetic construct
PLNGAVHLYAQAQRQPVQN

SEQ ID NO: 189 - protein, 19 aa, synthetic construct
PLNGNVHLYAQAQTGGVQN

SEQ ID NO: 190 - protein, 19 aa, synthetic construct
PLDGAVHLYAQAQTAWVQN

SEQ ID NO: 191 - protein, 19 aa, synthetic construct
PLNGAVHLYAQAQISGVQN

SEQ ID NO: 192 - protein, 19 aa, synthetic construct
PLNGAVHLYAQAQVRPVQN

SEQ ID NO: 193 - protein, 19 aa, synthetic construct
PLNGAVHLYAQAQLGPVQN

SEQ ID NO: 194 - protein, 19 aa, synthetic construct
PLNGAVHLYAQAQTNQVQN

SEQ ID NO: 195 - protein, 19 aa, synthetic construct
PLNGAVHLYAQAQVQQVQN

SEQ ID NO: 196 - protein, 19 aa, synthetic construct
PLNGAVHLYAQAQVANVQN

SEQ ID NO: 197 - protein, 19 aa, synthetic construct
PLNGAVHLYAQAQAAPVQN

SEQ ID NO: 198 - protein, 19 aa, synthetic construct
QLNGAVHLYAQAQVAQVQN

SEQ ID NO: 199 - protein, 19 aa, synthetic construct
PLNGAVHLYAQAQRSTVQN

SEQ ID NO: 200 - protein, 19 aa, synthetic construct
PLNGAVHLYAQAQTMAVQN

SEQ ID NO: 201 - protein, 19 aa, synthetic construct
PLNGAVHLYAQAQIQPVQN

SEQ ID NO: 202 - protein, 19 aa, synthetic construct
PLNGAVHLYAQAQIASVQN

SEQ ID NO: 203 - protein, 19 aa, synthetic construct
PLNGAVHLYAQAQTVSVQN

SEQ ID NO: 204 - protein, 19 aa, synthetic construct
PLNGAVHLYAQAQRGSVQN

SEQ ID NO: 205 - protein, 19 aa, synthetic construct
PLNGAVHLYAQAQNSPVQN

SEQ ID NO: 206 - protein, 19 aa, synthetic construct
PLNGAVHLYAQAQLQPVQN

SEQ ID NO: 207 - protein, 19 aa, synthetic construct
PLNGAVHLYAQAQVTGVQN

SEQ ID NO: 208 - protein, 19 aa, synthetic construct
PLNGAVHLYAQAQVMQVQN

SEQ ID NO: 209 - protein, 19 aa, synthetic construct
PLNGAVHLYAQAQSMAVQN

SEQ ID NO: 210 - protein, 19 aa, synthetic construct
PLNGAVHLYAQAQVGKVQN

SEQ ID NO: 211 - protein, 19 aa, synthetic construct
ALNGAVHLYAQAQSAPVQN

SEQ ID NO: 212 - protein, 19 aa, synthetic construct
PLNGAVHLYAQAQIQSVQN

SEQ ID NO: 213 - protein, 19 aa, synthetic construct
PLNGAVHLYAQAQCSPVQN

SEQ ID NO: 214 - protein, 19 aa, synthetic construct
PLNGAVHLYAQAQLQRVQN

SEQ ID NO: 215 - protein, 19 aa, synthetic construct
PLNGAVHLYAQAQTAWVQH

SEQ ID NO: 216 - protein, 19 aa, synthetic construct
PLDGAVHLYAQAQTGWDQN

SEQ ID NO: 217 - protein, 19 aa, synthetic construct
PLNGAVHLYAQAQTPPVQN

SEQ ID NO: 218 - protein, 19 aa, synthetic construct
PLNGAVHLYAQAQVTKVQN

SEQ ID NO: 219 - protein, 19 aa, synthetic construct
PLNGAVHLYAQAQSSPVQN

SEQ ID NO: 220 - protein, 19 aa, synthetic construct
PLNGAVHLYAQAQAGPVQN

SEQ ID NO: 221 - protein, 19 aa, synthetic construct
PLNGAVHLYAQAQLARVQN

SEQ ID NO: 222 - protein, 19 aa, synthetic construct
PLNGAVHLYAQAQTTTVQN

SEQ ID NO: 223 - protein, 19 aa, synthetic construct
PLNGAVHLYAQAQTGGFQN

SEQ ID NO: 224 - protein, 19 aa, synthetic construct
PLNGAVHLYAQAQTLQVQN

SEQ ID NO: 225 - protein, 19 aa, synthetic construct
PLNGAVHLYAQAQTMSVQN

SEQ ID NO: 226 - protein, 19 aa, synthetic construct
QLNGAVHLYAQAQLQPVQN

SEQ ID NO: 227 - protein, 19 aa, synthetic construct
PLNGAVHLYAQAQVAKVQN

SEQ ID NO: 228 - protein, 19 aa, synthetic construct
PLNGAVHLYAQAQRAAVQN

SEQ ID NO: 229 - protein, 19 aa, synthetic construct
PLNGAVHLYAQAQTVGVQN

SEQ ID NO: 230 - protein, 19 aa, synthetic construct
PLNGAVHLYAQAQLNPVQN

SEQ ID NO: 231 - protein, 19 aa, synthetic construct
PLNGAVHLYAQAQLSQVQN

SEQ ID NO: 232 - protein, 19 aa, synthetic construct
PLNGTVHLYAQAQTGSVQN

SEQ ID NO: 233 - protein, 19 aa, synthetic construct
PLNGAVHLYAQAQTKPVQN

SEQ ID NO: 234 - protein, 19 aa, synthetic construct
PLNGAVHLYAQAQTNAVQN

SEQ ID NO: 235 - protein, 19 aa, synthetic construct
ALDGAVHLYAQAQTGWVQN

SEQ ID NO: 236 - protein, 19 aa, synthetic construct
PLNGAVHLYAQAQLATVQN

SEQ ID NO: 237 - protein, 19 aa, synthetic construct
PLNGAVHLYAQAQVTPVQN

SEQ ID NO: 238 - protein, 19 aa, synthetic construct
PLNGAVHLYAQAQVQAVQN

SEQ ID NO: 239 - protein, 19 aa, synthetic construct
PLNGAVHLYAQAQTTSVQN

SEQ ID NO: 240 - protein, 19 aa, synthetic construct
PLNGAVHLYAQAQCTPVQN

SEQ ID NO: 241 - protein, 19 aa, synthetic construct
ALNGAVHLYAQAQTGRVQN

SEQ ID NO: 242 - protein, 19 aa, synthetic construct
PLNGSVHLYAQAQTGWVQD

SEQ ID NO: 243 - protein, 19 aa, synthetic construct
PLNGAVHLYAQAQTAGVQN

SEQ ID NO: 244 - protein, 19 aa, synthetic construct
PLNGAVHLYAQAQTSQVQN

SEQ ID NO: 245 - protein, 19 aa, synthetic construct
PLNGAVHLYAQAQTMNVQN

SEQ ID NO: 246 - protein, 19 aa, synthetic construct
PLNGAVHLYAQAQTSTVQN

SEQ ID NO: 247 - protein, 19 aa, synthetic construct
PLNGAVHLYAQAQVKPVQN

SEQ ID NO: 248 - protein, 19 aa, synthetic construct
PLNGAVHLYAQAQASPVQN

SEQ ID NO: 249 - protein, 19 aa, synthetic construct
PLNGAVHLYAQAQVAAVQN

SEQ ID NO: 250 - protein, 19 aa, synthetic construct
PLNGAVHLYAQAQLKSVQN

SEQ ID NO: 251 - protein, 19 aa, synthetic construct
PLNGAVHLYAQAQIAAVQN

SEQ ID NO: 252 - protein, 19 aa, synthetic construct
PLNGAVHLYAQAQTAAVQN

SEQ ID NO: 253 - protein, 19 aa, synthetic construct
PLNGAVHLYAQAQTKAVQN

SEQ ID NO: 254 - protein, 19 aa, synthetic construct
PLNGAVHLYAQAQTGSVQS

SEQ ID NO: 255 - protein, 19 aa, synthetic construct
PLNGAVHLYAQAQVSNVQN

SEQ ID NO: 256 - protein, 19 aa, synthetic construct
PLNGAVHLYAQAQTAPVQN

SEQ ID NO: 257 - protein, 19 aa, synthetic construct
PLNGAVHLYAQAQLMPVQN

SEQ ID NO: 258 - protein, 19 aa, synthetic construct
PLNGAVHLYAQAQLHPVQN

SEQ ID NO: 259 - protein, 19 aa, synthetic construct
PLNGAVHLYAQAQRAQVQN

SEQ ID NO: 260 - protein, 19 aa, synthetic construct
PLNGAVHLYAQAQLTNVQN

SEQ ID NO: 261 - protein, 19 aa, synthetic construct
PLNGAVHLYAQAQRTTVQN

SEQ ID NO: 262 - protein, 19 aa, synthetic construct
PLNGAVHLYAQAQTSVVQN

SEQ ID NO: 263 - protein, 19 aa, synthetic construct
SLNGAVHLYAQAQTMSVQN

SEQ ID NO: 264 - protein, 19 aa, synthetic construct
ALNGAVHLYAQAQTLAVQN

SEQ ID NO: 265 - protein, 19 aa, synthetic construct
PLNGAVHLYAQAQRMSVQN

SEQ ID NO: 266 - protein, 19 aa, synthetic construct
ALNGAVHLYAQAQLTPVQN

SEQ ID NO: 267 - protein, 19 aa, synthetic construct
PLNGAVHLYAQAQVGNVQN

SEQ ID NO: 268 - protein, 19 aa, synthetic construct
PLNGAVHLYAQAQLMQVQN

SEQ ID NO: 269 - protein, 19 aa, synthetic construct
PLNGSVHLYAQAQTAQVQN

SEQ ID NO: 270 - protein, 19 aa, synthetic construct
PLNGAVHLYAQAQTATVQN

SEQ ID NO: 271 - protein, 19 aa, synthetic construct
PLNGAVHLYAQAQVHPVQN

SEQ ID NO: 272 - protein, 19 aa, synthetic construct
PLNGAVHLYAQAQVSPVQT

SEQ ID NO: 273 - protein, 19 aa, synthetic construct
PLNGAVHLYAQAQISSVQN

SEQ ID NO: 274 - protein, 19 aa, synthetic construct
PLNGAVHLYAQAQVASVQN

SEQ ID NO: 275 - protein, 19 aa, synthetic construct
PLNGAVHLYAQAQTRWDQN

SEQ ID NO: 276 - protein, 19 aa, synthetic construct
PLNGAVHLYAQAQTMTVQN

SEQ ID NO: 277 - protein, 19 aa, synthetic construct
PLNGAVHLYAQAQRSSVQN

SEQ ID NO: 278 - protein, 19 aa, synthetic construct
PLNGGVHLYAQAQTGWVRN

SEQ ID NO: 279 - protein, 19 aa, synthetic construct
PLNGAVHLYAQAQTAWVQN

SEQ ID NO: 280 - protein, 19 aa, synthetic construct
PLNGSVHLYAQAQPGWVQN

SEQ ID NO: 281 - protein, 19 aa, synthetic construct
ALNGAVHLYAQAQTGWAQN

SEQ ID NO: 282 - protein, 19 aa, synthetic construct
PLNGAVHLYAQAQRTGVQN

SEQ ID NO: 283 - protein, 19 aa, synthetic construct
ALNGAVHLYAQAQTGWVQS

SEQ ID NO: 284 - protein, 19 aa, synthetic construct
PLNGAVHLYAQAQVATVQN

SEQ ID NO: 285 - protein, 19 aa, synthetic construct
PLNGAVHLYAQAQVTSVQN

SEQ ID NO: 286 - protein, 19 aa, synthetic construct
PLNGAVHLYAQAQVSSVQN

SEQ ID NO: 287 - protein, 19 aa, synthetic construct
PLNGSVHLYAQAQTSSVQN

SEQ ID NO: 288 - protein, 19 aa, synthetic construct
PLNGAVHLYAQAQTNSVQN

SEQ ID NO: 289 - protein, 19 aa, synthetic construct
PLNGAVHLYAQAQVKAVQN

SEQ ID NO: 290 - protein, 19 aa, synthetic construct
PLNGAVHLYAQAQSGPVQN

SEQ ID NO: 291 - protein, 19 aa, synthetic construct
PLNGAVHLYAQAQTGPVQN

SEQ ID NO: 292 - protein, 19 aa, synthetic construct
PLNGAVHLYAQAQTAMVQN

SEQ ID NO: 293 - protein, 19 aa, synthetic construct
PLNGAVHLYAQAQTQPVQN

SEQ ID NO: 294 - protein, 19 aa, synthetic construct
PLNGSVHLYAQAQTGSVQN

SEQ ID NO: 295 - protein, 19 aa, synthetic construct
PLNGAVHLYAQAQTQQVQN

SEQ ID NO: 296 - protein, 19 aa, synthetic construct
PLNGAVHLYAQAQVSRVQN

SEQ ID NO: 297 - protein, 19 aa, synthetic construct
QLNGAVHLYAQAQVLPVQN

SEQ ID NO: 298 - protein, 19 aa, synthetic construct
PLNGAVHLYAQAQTGWVQP

SEQ ID NO: 299 - protein, 19 aa, synthetic construct
QLNGAVHLYAQAQLGSVQN

SEQ ID NO: 300 - protein, 19 aa, synthetic construct
PLNGAVHLYAQAQVSAVQN

SEQ ID NO: 301 - protein, 19 aa, synthetic construct
PLNGAVHLYAQAQVLSVQN

SEQ ID NO: 302 - protein, 19 aa, synthetic construct
PLNGAVHLYAQAQTQHVQN

SEQ ID NO: 303 - protein, 19 aa, synthetic construct
PLNGAVHLYAQAQLASVQN

SEQ ID NO: 304 - protein, 19 aa, synthetic construct
PLNGAVHLYAQAQQAPVQN

SEQ ID NO: 305 - protein, 19 aa, synthetic construct
PLNGAVHLYAQAQNAQVQN

SEQ ID NO: 306 - protein, 19 aa, synthetic construct
PLNGAVHLYAQAQATPVQN

SEQ ID NO: 307 - protein, 19 aa, synthetic construct
PLNGAVHLYAQAQVQPVQN

SEQ ID NO: 308 - protein, 19 aa, synthetic construct
PLNGAVHLYAQAQTTAVQN

SEQ ID NO: 309 - protein, 19 aa, synthetic construct
PLNGAVHLYAQAQTGWVRN

SEQ ID NO: 310 - protein, 19 aa, synthetic construct
PLNGAVHLYAQAQLAAVQN

SEQ ID NO: 311 - protein, 19 aa, synthetic construct
PLNGAVHLYAQAQTSPDQN

SEQ ID NO: 312 - protein, 19 aa, synthetic construct
PLNGAVHLYAQAQRSGVQN

SEQ ID NO: 313 - protein, 19 aa, synthetic construct
PLNGAVHLYAQAQTGGVQT

SEQ ID NO: 314 - protein, 19 aa, synthetic construct
PLNGAVHLYAQAQTGWVPN

SEQ ID NO: 315 - protein, 19 aa, synthetic construct
PLDSAVHLYAQAQTGWVQN

SEQ ID NO: 316 - protein, 19 aa, synthetic construct
PLNGAVHLYAQAQTTPVQT

SEQ ID NO: 317 - protein, 19 aa, synthetic construct
PLNGAVHLYAQAQLMAVQN

SEQ ID NO: 318 - protein, 19 aa, synthetic construct
PLNGAVHLYAQAQTMPVQN

SEQ ID NO: 319 - protein, 19 aa, synthetic construct
PLNGAVHHYAQAQTSPVQN

SEQ ID NO: 320 - protein, 19 aa, synthetic construct
PLNGAVHLYAQAQLANVQN

SEQ ID NO: 321 - protein, 19 aa, synthetic construct
PLNGAVHLYAQAQVSTVQN

SEQ ID NO: 322 - protein, 19 aa, synthetic construct
PLNGAVHLYAQAQSAQVQN

SEQ ID NO: 323 - protein, 19 aa, synthetic construct
PLNGAVHLYAQAQNTPVQN

SEQ ID NO: 324 - protein, 19 aa, synthetic construct
PLNGAVHLYAQAQVSSVQT

SEQ ID NO: 325 - protein, 19 aa, synthetic construct
PLNGAVHLYAQAQTVSVKN

SEQ ID NO: 326 - protein, 19 aa, synthetic construct
PLNGAVHLYAQPQTGLVQN

SEQ ID NO: 327 - protein, 19 aa, synthetic construct
PLNGAVHLYAQAQTGSVQN

SEQ ID NO: 328 - protein, 19 aa, synthetic construct
SLNGAVHLYAQAQTLPVQN

SEQ ID NO: 329 - protein, 19 aa, synthetic construct
PLNGAVHLYAQAQTGGAQN

SEQ ID NO: 330 - protein, 19 aa, synthetic construct
SLNGAVHLYAQAQTAQVQN

SEQ ID NO: 331 - protein, 19 aa, synthetic construct
PLNGAVHLYAQAQTAVVQN

SEQ ID NO: 332 - protein, 19 aa, synthetic construct
PLNGAVHLYAQAQRLGVQN

SEQ ID NO: 333 - protein, 19 aa, synthetic construct
PLNGSVHLYAQAQTGWVQH

SEQ ID NO: 334 - protein, 19 aa, synthetic construct
PLNGAVHLYAQAQRTLVQN

SEQ ID NO: 335 - protein, 19 aa, synthetic construct
SLNGAVHLYAQAQTMAVQN

SEQ ID NO: 336 - protein, 19 aa, synthetic construct
PLNGAVHLYAQAQTQMVQN

SEQ ID NO: 337 - protein, 19 aa, synthetic construct
PLNGAVHLYAQAQITPVQN

SEQ ID NO: 338 - protein, 19 aa, synthetic construct
PLNGAVHLYAQAQTVWVQK

SEQ ID NO: 339 - protein, 19 aa, synthetic construct
PLNGAVHLYAQAQRSAVQN

SEQ ID NO: 340 - protein, 19 aa, synthetic construct
PLNGAVHLYAQAQTASVQN

SEQ ID NO: 341 - protein, 19 aa, synthetic construct
PLNGAVHLYAQAQTMGVQN

SEQ ID NO: 342 - protein, 19 aa, synthetic construct
PLNGAVHLYAQAQTGGVQH

SEQ ID NO: 343 - protein, 19 aa, synthetic construct
PLNGAVHLYAQAQVQSVQN

SEQ ID NO: 344 - protein, 19 aa, synthetic construct
PLNGAVHLYAQAQTGGVQN

SEQ ID NO: 345 - protein, 19 aa, synthetic construct
SLNGAVHLYAQAQTAPVQN

SEQ ID NO: 346 - protein, 19 aa, synthetic construct
PLNGAVHLYAQAQISPVQN

SEQ ID NO: 347 - protein, 19 aa, synthetic construct
PLNGAVHLYAQPQTGWVKN

SEQ ID NO: 348 - protein, 19 aa, synthetic construct
PLNGAVHLYAQAQTGSAQN

SEQ ID NO: 349 - protein, 19 aa, synthetic construct
PLNGAVHLYAQAQTGWAQN

SEQ ID NO: 350 - protein, 19 aa, synthetic construct
PLNGAVHLYAQAQTMSVQT

SEQ ID NO: 351 - protein, 19 aa, synthetic construct
PLNGSVHLYAQAQTAWVQN

SEQ ID NO: 352 - protein, 19 aa, synthetic construct
PLNGAVHLYAQAQVGGVQN

SEQ ID NO: 353 - protein, 19 aa, synthetic construct
PLNGAVHLYAKAQTSPVQN

SEQ ID NO: 354 - protein, 19 aa, synthetic construct
PLNGAVHLYAQAQLAPVQT

SEQ ID NO: 355 - protein, 19 aa, synthetic construct
PLDGAVHLYAQAQTALVQN

SEQ ID NO: 356 - protein, 19 aa, synthetic construct
PLNGAVHLYAQAQTALVQN

SEQ ID NO: 357 - protein, 19 aa, synthetic construct
PLNGAVHLYAQAQLAGVQN

SEQ ID NO: 358 - protein, 19 aa, synthetic construct
PLNGAVHLYAQAQRTAVQN

SEQ ID NO: 359 - protein, 19 aa, synthetic construct
PLNGAVHLYAQAQRSPVQN

SEQ ID NO: 360 - protein, 19 aa, synthetic construct
PLNGAVHLYAQAQTLAVQN

SEQ ID NO: 361 - protein, 19 aa, synthetic construct
PLNGAVHLYAQAQLAHVQN

SEQ ID NO: 362 - protein, 19 aa, synthetic construct
PLNGAVHLYAQAQTSLVQN

SEQ ID NO: 363 - protein, 19 aa, synthetic construct
PLNGAVHLYAQAQRLSVQN

SEQ ID NO: 364 - protein, 19 aa, synthetic construct
PLNGAVHLYDQAQLSPVQN

SEQ ID NO: 365 - protein, 19 aa, synthetic construct
PLNGAVHLYAQAQLMGVQN

SEQ ID NO: 366 - protein, 19 aa, synthetic construct
PLNGSVHLYAQAQTGWVQT

SEQ ID NO: 367 - protein, 19 aa, synthetic construct
PLNGAVHLYAQAQSMQVQN

SEQ ID NO: 368 - protein, 19 aa, synthetic construct
PLNGGVHLYAQAQTGWFQN

SEQ ID NO: 369 - protein, 19 aa, synthetic construct
PLNGAVHLYAQAQTQTVQN

SEQ ID NO: 370 - protein, 19 aa, synthetic construct
PLDGAVHLYSQAQTGWVQN

SEQ ID NO: 371 - protein, 19 aa, synthetic construct
PLNGAVHLYAQAQTGWEQN

SEQ ID NO: 372 - protein, 19 aa, synthetic construct
PLNGAVHLYAQAQVGSVQN

SEQ ID NO: 373 - protein, 19 aa, synthetic construct
PLNGAVHLYAQAQVSGVQN

SEQ ID NO: 374 - protein, 19 aa, synthetic construct
PLNGAVHLYAQAQVMAVQN

SEQ ID NO: 375 - protein, 19 aa, synthetic construct
PLNGAVHLYAQAQIGGVQN

SEQ ID NO: 376 - protein, 19 aa, synthetic construct
PLNGAVHLYAQAQIAGVQN

SEQ ID NO: 377 - protein, 19 aa, synthetic construct
PLNGAVHLYAKAQTVSVQN

SEQ ID NO: 378 - protein, 19 aa, synthetic construct
PLNGAVHLYSQAQTGRVQN

SEQ ID NO: 379 - protein, 19 aa, synthetic construct
PLNGAVHLYAQAQLSHVQN

SEQ ID NO: 380 - protein, 19 aa, synthetic construct
PLNGAVHLYAQAQVQTVQN

SEQ ID NO: 381 - protein, 19 aa, synthetic construct
SLDGAVHLYAQAQTGWVQN

SEQ ID NO: 382 - protein, 19 aa, synthetic construct
PLNGAVHLYAQPQTGWDQN

SEQ ID NO: 383 - protein, 19 aa, synthetic construct
PLNGAVHLYAQAQRNSVQN

SEQ ID NO: 384 - protein, 19 aa, synthetic construct
PLNGAVHLYAQAQTLPVQN

SEQ ID NO: 385 - protein, 19 aa, synthetic construct
PLNGAVHLYAQAQTKQVQN

SEQ ID NO: 386 - protein, 19 aa, synthetic construct
PLNGSVHLYAQAQTGWVQN

SEQ ID NO: 387 - protein, 19 aa, synthetic construct
PLNGAVHLYAQAQLGQVQN

SEQ ID NO: 388 - protein, 19 aa, synthetic construct
SLNGAVHLYAQAQTGRVQN

SEQ ID NO: 389 - protein, 19 aa, synthetic construct
PLDGAVHLYAQAQTGWVQN

SEQ ID NO: 390 - protein, 19 aa, synthetic construct
PLNGSVHLYAQAQTGWAQN

SEQ ID NO: 391 - protein, 19 aa, synthetic construct
TLNGAVHLYAQAQVASVQN

SEQ ID NO: 392 - protein, 19 aa, synthetic construct
PLNGAVHLYAQAQNMQVQN

SEQ ID NO: 393 - protein, 19 aa, synthetic construct
PLNGAVHLYAQAQNVQVQN

SEQ ID NO: 394 - protein, 19 aa, synthetic construct
PLNGAVHLYAQAQTGSVQI

SEQ ID NO: 395 - protein, 19 aa, synthetic construct
PLNGTVHLYAQAQTGGVQN

SEQ ID NO: 396 - protein, 19 aa, synthetic construct
PLNGAVHLYAKAQVSPVQN

SEQ ID NO: 397 - protein, 19 aa, synthetic construct
PLNGAVHLYAQAQRGGVQN

SEQ ID NO: 398 - protein, 19 aa, synthetic construct
PLNGGVHLYAQAQTGLVQN

SEQ ID NO: 399 - protein, 19 aa, synthetic construct
PLNGAVHLYAQAQVMSVQN

SEQ ID NO: 400 - protein, 19 aa, synthetic construct
PLNGAVHLYAQAQTTGVQN

SEQ ID NO: 401 - protein, 19 aa, synthetic construct
PLNGAVHLYAQAQLSPVQK

SEQ ID NO: 402 - protein, 19 aa, synthetic construct
SLNGAVHLYAQAQTAAVQN

SEQ ID NO: 403 - protein, 19 aa, synthetic construct
PINGAVHLYAQAQTSPVQN

SEQ ID NO: 404 - protein, 19 aa, synthetic construct
PLNGAVHLYAQAQLSRVQN

SEQ ID NO: 405 - protein, 19 aa, synthetic construct
PLNGAVHLYAQAQVSSVQK

SEQ ID NO: 406 - protein, 19 aa, synthetic construct
PLNGAVHLYAQAQTAPVQT

SEQ ID NO: 407 - protein, 19 aa, synthetic construct
PLNGAVHLYAQAQMAPVQN

SEQ ID NO: 408 - protein, 19 aa, synthetic construct
PLNGAVHLYAQAQILGVQN

SEQ ID NO: 409 - protein, 19 aa, synthetic construct
PLNGAVHLYAQAQTASVQT

SEQ ID NO: 410 - protein, 19 aa, synthetic construct
PLNGAVHLYAQAQTGSLQN

SEQ ID NO: 411 - protein, 19 aa, synthetic construct
PLNGAVHLYAQAQTGTVQN

SEQ ID NO: 412 - protein, 19 aa, synthetic construct
PLNGGVHLYAQAQTGWVQN

SEQ ID NO: 413 - protein, 19 aa, synthetic construct
PLNGAVHLYAQAQTGSVQT

SEQ ID NO: 414 - protein, 19 aa, synthetic construct
PLNGAVHLYAQAQTSSVQT

SEQ ID NO: 415 - protein, 19 aa, synthetic construct
PLNGAVHLYAQAQTSHVQN

SEQ ID NO: 416 - protein, 19 aa, synthetic construct
PLNGGVHLYAQAQTGWDQN

SEQ ID NO: 417 - protein, 19 aa, synthetic construct
PLNGAVHLYAQAQRIGVQN

SEQ ID NO: 418 - protein, 19 aa, synthetic construct
TLNGAVHLYAQAQTTSVQN

SEQ ID NO: 419 - protein, 19 aa, synthetic construct
PLNGAVHLYAQAQTGWGQT

SEQ ID NO: 420 - protein, 19 aa, synthetic construct
PLNGAVHLYAQAQSAMVQN

SEQ ID NO: 421 - protein, 19 aa, synthetic construct
PLNGAVHLYAQAQTSMVQN

SEQ ID NO: 422 - protein, 19 aa, synthetic construct
PLNGAVHLYAQAQSMGVQN

SEQ ID NO: 423 - protein, 19 aa, synthetic construct
PLNGAVHLYAQAQSMSVQN

SEQ ID NO: 424 - protein, 19 aa, synthetic construct
PLNGAVHLYAQAQTSSVQN

SEQ ID NO: 425 - protein, 19 aa, synthetic construct
PLNGAVHLYAQAQTSGVQN

SEQ ID NO: 426 - protein, 19 aa, synthetic construct
PLNGAVHLYAQAQTGAVQN

SEQ ID NO: 427 - protein, 19 aa, synthetic construct
PLNGAVHLYAQAQVNSVQN

SEQ ID NO: 428 - protein, 19 aa, synthetic construct
PLNGAVHLYAQAQVAGVQN

SEQ ID NO: 429 - protein, 19 aa, synthetic construct
PLNGAVHLYAQAQIGSVQN

SEQ ID NO: 430 - protein, 19 aa, synthetic construct
PLDGAVHVYAQAQTGWVQN

SEQ ID NO: 431 - protein, 19 aa, synthetic construct
TLNGAVHLYAQAQTTPVQN

SEQ ID NO: 432 - protein, 19 aa, synthetic construct
PLNGAVHLYAQAQLGSVQN

SEQ ID NO: 433 - protein, 19 aa, synthetic construct
PLNGAVHLYAQAQVNGVQN

SEQ ID NO: 434 - protein, 19 aa, synthetic construct
QLNGAVHLYAQAQLSSVQN

SEQ ID NO: 435 - protein, 19 aa, synthetic construct
PLNGAVHLYAQAQLTAVQN

SEQ ID NO: 436 - protein, 19 aa, synthetic construct
PLNGAVHLYAQAQVQNVQN

SEQ ID NO: 437 - protein, 19 aa, synthetic construct
PLNGAVHLYAQAQTKSVQN

SEQ ID NO: 438 - protein, 19 aa, synthetic construct
PLNGAVHLYAQAQSVGVQN

SEQ ID NO: 439 - protein, 19 aa, synthetic construct
QLNGAVHLYAQAQLGPVQN

SEQ ID NO: 440 - protein, 19 aa, synthetic construct
PLNGAVHLYAQAQTAWVQT

SEQ ID NO: 441 - protein, 19 aa, synthetic construct
PLNGAVHLYAQAQNASVQN

SEQ ID NO: 442 - protein, 19 aa, synthetic construct
PLNGAVHLYAQAQTSAVQN

SEQ ID NO: 443 - protein, 19 aa, synthetic construct
ALNGAVHLYAQAQLAAVQN

SEQ ID NO: 444 - protein, 19 aa, synthetic construct
PLNGAVHLYDQAQVSPVQN

SEQ ID NO: 445 - protein, 19 aa, synthetic construct
PLNGAVHLYAQAQTMSVKN

SEQ ID NO: 446 - protein, 19 aa, synthetic construct
PLNGAVHLYAQAQTANVQN

SEQ ID NO: 447 - protein, 19 aa, synthetic construct
PLNGAVHLYAQAQTGWFQN

SEQ ID NO: 448 - protein, 19 aa, synthetic construct
PLNGNVHLYAQAQTGWVQN

SEQ ID NO: 449 - protein, 19 aa, synthetic construct
PLNGSVHLYAQAQTGWVQS

SEQ ID NO: 450 - protein, 19 aa, synthetic construct
PLNGAVHLYAQAQTGGVLN

SEQ ID NO: 451 - protein, 19 aa, synthetic construct
PLNGAVHLYAQAQLTSVQN

SEQ ID NO: 452 - protein, 19 aa, synthetic construct
PLNGAVHLYAQAQTGWVQT

SEQ ID NO: 453 - protein, 19 aa, synthetic construct
PLNGAVHLYAQAQRSQVQN

SEQ ID NO: 454 - protein, 19 aa, synthetic construct
PLNGAVHIYAQAQVSPVQN

SEQ ID NO: 455 - protein, 19 aa, synthetic construct
PLNGSVHLYAQAQTGWFQN

SEQ ID NO: 456 - protein, 19 aa, synthetic construct
PLNGAVHLYAQAQRIPVQN

SEQ ID NO: 457 - protein, 19 aa, synthetic construct
QLNGAVHLYAQAQLVPVQN

SEQ ID NO: 458 - protein, 19 aa, synthetic construct
PLNGAVHLYAQAQTGWVQD

SEQ ID NO: 459 - protein, 19 aa, synthetic construct
PLNGAVHLYAKAQVSSVQN

SEQ ID NO: 460 - protein, 19 aa, synthetic construct
PLNGAVHLYAQAQRVEVQN

SEQ ID NO: 461 - protein, 19 aa, synthetic construct
PLNGAVHLYAQAQVLPVQN

SEQ ID NO: 462 - protein, 19 aa, synthetic construct
PLNGSVHLYAQAQTGWVRN

SEQ ID NO: 463 - protein, 19 aa, synthetic construct
PLNGTVHLYAQAQSSPVQN

SEQ ID NO: 464 - protein, 19 aa, synthetic construct
PLNGAVHLYAQAQTGGVQK

SEQ ID NO: 465 - protein, 19 aa, synthetic construct
PLNGAVHLYAQAQSVAVQN

SEQ ID NO: 466 - protein, 19 aa, synthetic construct
QLNGAVHLYAQAQLSGVQN

SEQ ID NO: 467 - protein, 19 aa, synthetic construct
PLNGAVHLYAQAQLQQVQN

SEQ ID NO: 468 - protein, 19 aa, synthetic construct
PLNGAVHLYAQAQLSTVQN

SEQ ID NO: 469 - protein, 19 aa, synthetic construct
PLNGAVHLYAQAQSAAVQN

SEQ ID NO: 470 - protein, 19 aa, synthetic construct
SLNGAVHLYAQAQVSAVQN

SEQ ID NO: 471 - protein, 19 aa, synthetic construct
PLNGAVHLYAQAQRTSVQN

SEQ ID NO: 472 - protein, 19 aa, synthetic construct
PLNGAVHLYAQAQTQNVQN

SEQ ID NO: 473 - protein, 19 aa, synthetic construct
PLNGAVHLYAQAQVNAVQN

SEQ ID NO: 474 - protein, 19 aa, synthetic construct
PLNGAVHLYAQAQTVAVQT

SEQ ID NO: 475 - protein, 19 aa, synthetic construct
PLNGAVHLYAQAQLMSVQN

SEQ ID NO: 476 - protein, 19 aa, synthetic construct
PLNGAVHLYAQAQTGWVQN

SEQ ID NO: 477 - protein, 19 aa, synthetic construct
PLNGAVHLYAHAQTGWVQH

SEQ ID NO: 478 - protein, 19 aa, synthetic construct
PLNGAVHLYAQAQTGWVQH

SEQ ID NO: 479 - protein, 19 aa, synthetic construct
PLNGAVHHYAQAQTMSVQN

SEQ ID NO: 480 - protein, 19 aa, synthetic construct
PLNGAVHLYAQAQTGWVQS

SEQ ID NO: 481 - protein, 19 aa, synthetic construct
PLNGAVHLYDQAQTTPVQN

SEQ ID NO: 482 - protein, 19 aa, synthetic construct
PLNGAVHLYAQAQTMMVQN

SEQ ID NO: 483 - protein, 19 aa, synthetic construct
PLNGAVHLYAQAQTGGVQS

SEQ ID NO: 484 - protein, 19 aa, synthetic construct
PLNGAVNLYAQAQTSPVQN

SEQ ID NO: 485 - protein, 19 aa, synthetic construct
ALNGAVHLYAQAQTGLVQN

SEQ ID NO: 486 - protein, 19 aa, synthetic construct
ALNGAVHLYAQAQVATVQN

SEQ ID NO: 487 - protein, 19 aa, synthetic construct
PLNGAVHLYAQAQTGSFQN

SEQ ID NO: 488 - protein, 19 aa, synthetic construct
PLNGAVHLYAQAQRSVVQN

SEQ ID NO: 489 - protein, 19 aa, synthetic construct
PLNGAVHLYAQAQTGSVQK

SEQ ID NO: 490 - protein, 19 aa, synthetic construct
PLNGAVHLYAQAQTQLVQN

SEQ ID NO: 491 - protein, 19 aa, synthetic construct
PLNGAVHLYAQAQTGGVHN

SEQ ID NO: 492 - protein, 19 aa, synthetic construct
PLNGAVHLYAQAQRTPVQN

SEQ ID NO: 493 - protein, 19 aa, synthetic construct
PLNGAVHLYAQAQRQQVQN

SEQ ID NO: 494 - protein, 19 aa, synthetic construct
PLNGAVHLYAQAQTGSVRN

SEQ ID NO: 495 - protein, 19 aa, synthetic construct
PLNGAVHLYAQAQVQGVQN

SEQ ID NO: 496 - protein, 19 aa, synthetic construct
TLNGAVHLYAQAQVSPVQN

SEQ ID NO: 497 - protein, 19 aa, synthetic construct
PLNGAVHLYAQAQPGWVQT

SEQ ID NO: 498 - protein, 19 aa, synthetic construct
PLNGAVHLYAQAQSTQVQN

SEQ ID NO: 499 - protein, 19 aa, synthetic construct
PLNGSVHLYAQAQTGWVEN

SEQ ID NO: 500 - protein, 19 aa, synthetic construct
PLNGAVHLYAQAQQSPVQN

SEQ ID NO: 501 - protein, 19 aa, synthetic construct
PLNGAVHLYAQAQRYSVQN

SEQ ID NO: 502 - protein, 19 aa, synthetic construct
PLNGAVHLYAQAQTGWDQN

SEQ ID NO: 503 - protein, 19 aa, synthetic construct
PLNGAVHLYAQAQTQRVQN

SEQ ID NO: 504 - protein, 19 aa, synthetic construct
ALNGAVHLYAQAQTGWVRN

SEQ ID NO: 505 - protein, 19 aa, synthetic construct
PLNGAVHLYAQPQTGWVQN

SEQ ID NO: 506 - protein, 19 aa, synthetic construct
ALNGAVHLYAQAQVSGVQN

SEQ ID NO: 507 - protein, 19 aa, synthetic construct
PLNGAVHLYAQAQSAGVQN

SEQ ID NO: 508 - protein, 19 aa, synthetic construct
PLNGAVHLYAQAQSAPVQT

SEQ ID NO: 509 - protein, 19 aa, synthetic construct
PLNGAVHLYAQAQRQSVQN

SEQ ID NO: 510 - protein, 19 aa, synthetic construct
PLNGAVHLYAQAQSQPVQN

SEQ ID NO: 511 - protein, 19 aa, synthetic construct
PLNGAVHLYAQAQVASVKN

SEQ ID NO: 512 - protein, 19 aa, synthetic construct
PLNGAVHLYAQAQTAWVRN

SEQ ID NO: 513 - protein, 19 aa, synthetic construct
SLNGAVHLYAQAQTMQVQN

SEQ ID NO: 514 - protein, 19 aa, synthetic construct
PLNGAVNLYAQAQSSPVQN

SEQ ID NO: 515 - protein, 19 aa, synthetic construct
PLNGAVHLYAQAQTGGGQN

SEQ ID NO: 516 - protein, 19 aa, synthetic construct
PLNGAVHLYDQAQVASVQN

SEQ ID NO: 517 - protein, 19 aa, synthetic construct
PLNGAVHLYAQAQSTSVQN

SEQ ID NO: 518 - protein, 19 aa, synthetic construct
PLNGTVHLYAQAQTGWVQH

SEQ ID NO: 519 - protein, 19 aa, synthetic construct
QLNGAVHLYAQAQTSSVQN

SEQ ID NO: 520 - protein, 19 aa, synthetic construct
PLDGAVHLYAQAQTGWVHN

SEQ ID NO: 521 - protein, 19 aa, synthetic construct
PLNGTVHLYAQAQTGWVQK

SEQ ID NO: 522 - protein, 19 aa, synthetic construct
PLNGAVHLYAQAQVLGVQN

SEQ ID NO: 523 - protein, 19 aa, synthetic construct
PLNGAVHLYAQAQNQPVQN

SEQ ID NO: 524 - protein, 19 aa, synthetic construct
PLNGAVHLYAQAQLGTVQN

SEQ ID NO: 525 - protein, 19 aa, synthetic construct
PLNGAVHLYAQAQRAGVQN

SEQ ID NO: 526 - protein, 19 aa, synthetic construct
PVNGAVHLYAQAQTGLVQN

SEQ ID NO: 527 - protein, 19 aa, synthetic construct
PLNGGVHLYAQAQTGWVQH

SEQ ID NO: 528 - protein, 19 aa, synthetic construct
PLNGAVHLYAQAQTGRVQN

SEQ ID NO: 529 - protein, 19 aa, synthetic construct
PLNGAVHLYAQAQTGGVKN

SEQ ID NO: 530 - protein, 19 aa, synthetic construct
PLNGAVHLYAQAQTAWLQN

SEQ ID NO: 531 - protein, 19 aa, synthetic construct
PLNGAVHLYAQAQTRWVQK

SEQ ID NO: 532 - protein, 19 aa, synthetic construct
PLNGAVHLYAQAQLAPVKN

SEQ ID NO: 533 - protein, 19 aa, synthetic construct
PLNGAVHHYAQAQTSSVQN

SEQ ID NO: 534 - protein, 19 aa, synthetic construct
PLNGAVHLYAQAQTGSVQD

SEQ ID NO: 535 - protein, 19 aa, synthetic construct
PLNGAVHLYAQAQTGMVQN

SEQ ID NO: 536 - protein, 19 aa, synthetic construct
PLNGAVHLYAQAQLSNVQN

SEQ ID NO: 537 - protein, 19 aa, synthetic construct
PLNGAVHLYAQAQRLPVQN

SEQ ID NO: 538 - protein, 19 aa, synthetic construct
PLNGAVHLYAQAQRQGVQN

SEQ ID NO: 539 - protein, 19 aa, synthetic construct
PLNGAVHLYAQAQSTPVQT

SEQ ID NO: 540 - protein, 19 aa, synthetic construct
QLNGNVHLYAQAQTGWVQN

SEQ ID NO: 541 - protein, 19 aa, synthetic construct
PLNGGVHLYAQAQTGWVQT

SEQ ID NO: 542 - protein, 19 aa, synthetic construct
PLNGAVHLYAQAQTTPVKN

SEQ ID NO: 543 - protein, 19 aa, synthetic construct
PLNGAVHLYAQAQRLTVQN

SEQ ID NO: 544 - protein, 19 aa, synthetic construct
PLNGAVHLYAQAQTLRVQN

SEQ ID NO: 545 - protein, 19 aa, synthetic construct
PLNGAVHLYAQAQSAFVQN

SEQ ID NO: 546 - protein, 19 aa, synthetic construct
SLNGAVHLYAQAQTNSVQN

SEQ ID NO: 547 - protein, 19 aa, synthetic construct
PLNGAVHLYAQAQSVQVQN

SEQ ID NO: 548 - protein, 19 aa, synthetic construct
PLDGAVHLYAQAQTAAVQN

SEQ ID NO: 549 - protein, 19 aa, synthetic construct
SLNGAVHLYAQAQLMPVQN

SEQ ID NO: 550 - protein, 19 aa, synthetic construct
PLDGAVHLYAQAQTGWVQT

SEQ ID NO: 551 - protein, 19 aa, synthetic construct
PLNGAVHLYAQAQLLPVQN

SEQ ID NO: 552 - protein, 19 aa, synthetic construct
PLNGAVHLYAQAQRTQVQN

SEQ ID NO: 553 - protein, 19 aa, synthetic construct
PLNGAVHLYAQAQTGSDQN

SEQ ID NO: 554 - protein, 19 aa, synthetic construct
PLNGAVHLYAQAQVASDQN

SEQ ID NO: 555 - protein, 19 aa, synthetic construct
PLNGAVNLYAQAQLAPVQN

SEQ ID NO: 556 - protein, 19 aa, synthetic construct
PLNGSVHLYAQAQTGWLQN

SEQ ID NO: 557 - protein, 19 aa, synthetic construct
PLNGTVHLYAQAQTGWVQN

SEQ ID NO: 558 - protein, 19 aa, synthetic construct
PLNGAVHLYAQAQVSPVKN

SEQ ID NO: 559 - protein, 19 aa, synthetic construct
PLNGAVHLYAQAQLPPVQN

SEQ ID NO: 560 - protein, 19 aa, synthetic construct
PLNGAVHLYAQAQSSPVQT

SEQ ID NO: 561 - protein, 19 aa, synthetic construct
PLNGAVHLYAQAQAQPVQN

SEQ ID NO: 562 - protein, 19 aa, synthetic construct
PLNGDVHLYAQAQTTSVQN

SEQ ID NO: 563 - protein, 19 aa, synthetic construct
PLNGAVHLYAQAQTPQVQN

SEQ ID NO: 564 - protein, 19 aa, synthetic construct
PLNGAVHLYAQAQTSWVQN

SEQ ID NO: 565 - protein, 19 aa, synthetic construct
PLNGAVHLYAQAQTGGDQN

SEQ ID NO: 566 - protein, 19 aa, synthetic construct
PLNGAVHLYAQAQLSPVKN

SEQ ID NO: 567 - protein, 19 aa, synthetic construct
PLNGAVHLYAQAQSSPVKN

SEQ ID NO: 568 - protein, 19 aa, synthetic construct
PLNGAVHLYAQAQNTTVQN

SEQ ID NO: 569 - protein, 19 aa, synthetic construct
PLDGAVHLYAQAQTGWVQH

SEQ ID NO: 570 - protein, 19 aa, synthetic construct
PLNGAVHLYAQAQTTRVQN

SEQ ID NO: 571 - protein, 19 aa, synthetic construct
PLDGAVHLYAQAQTGWLQN

SEQ ID NO: 572 - protein, 19 aa, synthetic construct
PLNGSVHLYAQPQTGWVQN

SEQ ID NO: 573 - protein, 19 aa, synthetic construct
PLNGAVHLYSQAQTGLVQN

SEQ ID NO: 574 - protein, 19 aa, synthetic construct
PLNGAVHLYAQAQTQWVQN

SEQ ID NO: 575 - protein, 19 aa, synthetic construct
PLNGSVHLYAQAQTGWVQI

SEQ ID NO: 576 - protein, 19 aa, synthetic construct
PLNGAVHLYAQAQTGSVHN

SEQ ID NO: 577 - protein, 19 aa, synthetic construct
ALNGAVHLYAQAQTGWVQN

SEQ ID NO: 578 - protein, 19 aa, synthetic construct
PLNGTVHLYAQAQTGWVRN

SEQ ID NO: 579 - protein, 19 aa, synthetic construct
PLNGAVHLYAQAQTGGLQN

SEQ ID NO: 580 - protein, 19 aa, synthetic construct
SLNGAVHLYAQAQVSGVQN

SEQ ID NO: 581 - protein, 19 aa, synthetic construct
PLNGAVHLYAQAQTAWVQK

SEQ ID NO: 582 - protein, 19 aa, synthetic construct
PLNGAVHLYAQAQTGRVQT

SEQ ID NO: 583 - protein, 19 aa, synthetic construct
TLNGAVHLYAQAQSAPVQN

SEQ ID NO: 584 - protein, 19 aa, synthetic construct
PLNGAVHLYDQAQTVAVQN

SEQ ID NO: 585 - protein, 19 aa, synthetic construct
QLNGAVHLYAQAQTGSVQN

SEQ ID NO: 586 - protein, 19 aa, synthetic construct
PLNGAVHLYAQAQNTQVQN

SEQ ID NO: 587 - protein, 19 aa, synthetic construct
PLNGAVHLYAQAQTGWLQN

SEQ ID NO: 588 - protein, 19 aa, synthetic construct
PINGAVHLYAQAQTGLVQN

SEQ ID NO: 589 - protein, 19 aa, synthetic construct
PLDGAVHLYAQAQTGWVQI

SEQ ID NO: 590 - protein, 19 aa, synthetic construct
PLNGSVHLYAQAQTGSVQT

SEQ ID NO: 591 - protein, 19 aa, synthetic construct
PLNGAVQLYAQAQTSSVQN

SEQ ID NO: 592 - protein, 19 aa, synthetic construct
PLNGAVHLYAQAQTYAVQN

SEQ ID NO: 593 - protein, 19 aa, synthetic construct
PLNGAVHLYAQAQTLSVQN

SEQ ID NO: 594 - protein, 19 aa, synthetic construct
PLNGAVHLYAQAQNLPVQN

SEQ ID NO: 595 - protein, 19 aa, synthetic construct
PLNGAVHLYAQAQTSSDQN

SEQ ID NO: 596 - protein, 19 aa, synthetic construct
PLNGAVHLYAQAQATSVQN

SEQ ID NO: 597 - protein, 19 aa, synthetic construct
TLNGAVHLYAQAQLSPVQN

SEQ ID NO: 598 - protein, 19 aa, synthetic construct
PLNGAVHLYAQAQTAWFQN

SEQ ID NO: 599 - protein, 19 aa, synthetic construct
TLNGAVHLYAQAQVTPVQN

SEQ ID NO: 600 - protein, 19 aa, synthetic construct
TLNGAVHLYAQAQTAAVQN

SEQ ID NO: 601 - protein, 19 aa, synthetic construct
PLNGAVHLYAQAQATQVQN

SEQ ID NO: 602 - protein, 19 aa, synthetic construct
RLDGAVHLYAQAQTGWVQN

SEQ ID NO: 603 - protein, 19 aa, synthetic construct
QLNGAVHLYAQAQTGWVEN

SEQ ID NO: 604 - protein, 19 aa, synthetic construct
PLNGAVHLYAQAQVSSVKN

SEQ ID NO: 605 - protein, 19 aa, synthetic construct
PLNGAVHLYAQAQLSSVQN

SEQ ID NO: 606 - protein, 19 aa, synthetic construct
PLNGAVHLYAQAQTGSGQN

SEQ ID NO: 607 - protein, 19 aa, synthetic construct
PLNGAVHLYAQAQLQPVQT

SEQ ID NO: 608 - protein, 19 aa, synthetic construct
PINGAVHLYAQAQLSSVQN

SEQ ID NO: 609 - protein, 19 aa, synthetic construct
PINGAVHLYAQAQTVAVQN

SEQ ID NO: 610 - protein, 19 aa, synthetic construct
PLNGAVHLYAQAQVSAVKN

SEQ ID NO: 611 - protein, 19 aa, synthetic construct
SLNGAVHLYAQAQTVAVQN

SEQ ID NO: 612 - protein, 19 aa, synthetic construct
PLNGAVHLYAQAQTQAVQN

SEQ ID NO: 613 - protein, 19 aa, synthetic construct
QLNGAVHLYAQAQTAQVQN

SEQ ID NO: 614 - protein, 19 aa, synthetic construct
PLNGAVHLYDQAQTMSVQN

SEQ ID NO: 615 - protein, 19 aa, synthetic construct
PLNGAVHLYAQPQTGWVQK

SEQ ID NO: 616 - protein, 19 aa, synthetic construct
PLNGAVHLYAQAQVMPVQN

SEQ ID NO: 617 - protein, 19 aa, synthetic construct
PLNGAVHLYAQAQTVSVQK

SEQ ID NO: 618 - protein, 19 aa, synthetic construct
PLNGAVHLYAQAQTAWAQN

SEQ ID NO: 619 - protein, 19 aa, synthetic construct
PLNGAVHLYAQAQNALVQN

SEQ ID NO: 620 - protein, 19 aa, synthetic construct
TLNGAVHLYAQAQVSAVQN

SEQ ID NO: 621 - protein, 19 aa, synthetic construct
PLKGAVHLYAQAQTTPVQN

SEQ ID NO: 622 - protein, 19 aa, synthetic construct
QLNGSVHLYAQAQTGWVQN

SEQ ID NO: 623 - protein, 19 aa, synthetic construct
SLNGAVHLYAQAQVATVQN

SEQ ID NO: 624 - protein, 19 aa, synthetic construct
PLNGAVHLYAQAQRMLVQN

SEQ ID NO: 625 - protein, 19 aa, synthetic construct
PLNGAVHLYAQAQTVAVKN

SEQ ID NO: 626 - protein, 19 aa, synthetic construct
PLNGAVHLYDQAQTTSVQN

SEQ ID NO: 627 - protein, 19 aa, synthetic construct
PLNGAVHLYAQAQRQLVQN

SEQ ID NO: 628 - protein, 19 aa, synthetic construct
PLNGAVHLYAQAQTLGVQN

SEQ ID NO: 629 - protein, 19 aa, synthetic construct
PLNGAVHLYAQAQLGPVQT

SEQ ID NO: 630 - protein, 19 aa, synthetic construct
PLNGGVHLYAQAQTGWVQD

SEQ ID NO: 631 - protein, 19 aa, synthetic construct
PLNGAVHLYAQAQTGSVKN

SEQ ID NO: 632 - protein, 19 aa, synthetic construct
PLNGAVNLYAQAQLASVQN

SEQ ID NO: 633 - protein, 19 aa, synthetic construct
PLNGAVHLYDQAQVSSVQN

SEQ ID NO: 634 - protein, 19 aa, synthetic construct
PLNGAVHLYAQAQTMSDQN

SEQ ID NO: 635 - protein, 19 aa, synthetic construct
PLNGAVHLYAQAQTGWVQK

SEQ ID NO: 636 - protein, 19 aa, synthetic construct
PLNGAVHLYAQAQLASVKN

SEQ ID NO: 637 - protein, 19 aa, synthetic construct
PLNGGVHLYAQAQTGWGQN

SEQ ID NO: 638 - protein, 19 aa, synthetic construct
QLNGSVHLYAQAQTGWVQT

SEQ ID NO: 639 - protein, 19 aa, synthetic construct
QLNGAVHLYAQAQTTGVQN

SEQ ID NO: 640 - protein, 19 aa, synthetic construct
PLNGAVHLYAQAQTGFVQN

SEQ ID NO: 641 - protein, 19 aa, synthetic construct
PLNGAVHLYAQAQSALVQN

SEQ ID NO: 642 - protein, 19 aa, synthetic construct
ALNGAVHLYAQAQTGWDQN

SEQ ID NO: 643 - protein, 19 aa, synthetic construct
QLNGAVHLYAQAQISGVQN

SEQ ID NO: 644 - protein, 19 aa, synthetic construct
QLNGAVHLYAQAQRGSVQN

SEQ ID NO: 645 - protein, 19 aa, synthetic construct
PLNGAVHLYAQAQTGWVKT

SEQ ID NO: 646 - protein, 19 aa, synthetic construct
PLNGAVHLYAQAQSQLVQN

SEQ ID NO: 647 - protein, 19 aa, synthetic construct
PLNGSVHLYAQAQTGWGQN

SEQ ID NO: 648 - protein, 19 aa, synthetic construct
QLNGAVHLYAQAQTGWVPN

SEQ ID NO: 649 - protein, 19 aa, synthetic construct
PLNGAVHLYAKAQTGWVKN

SEQ ID NO: 650 - protein, 19 aa, synthetic construct
PLNGAVHLYAHAQTGWGQN

SEQ ID NO: 651 - protein, 19 aa, synthetic construct
ALNGAVHLYAQAQTGWVQH

SEQ ID NO: 652 - protein, 19 aa, synthetic construct
PLNGSVHLYAQAQIASVQN

SEQ ID NO: 653 - protein, 19 aa, synthetic construct
ALNGAVHLYAQAQTAMVQN

SEQ ID NO: 654 - protein, 19 aa, synthetic construct
TLNGAVHLYAQAQTMAVQN

SEQ ID NO: 655 - protein, 19 aa, synthetic construct
PHNGAVHLYAQAQVSSVQN

SEQ ID NO: 656 - protein, 19 aa, synthetic construct
PLNGAVQLYAQAQTAPVQN

SEQ ID NO: 657 - protein, 19 aa, synthetic construct
PLNGSVHLYAQAQKGSVQN

SEQ ID NO: 658 - protein, 19 aa, synthetic construct
PLNGAVHLYAQAQLSAVQN

SEQ ID NO: 659 - protein, 19 aa, synthetic construct
PINGAVHLYAQAQVSAVQN

SEQ ID NO: 660 - protein, 19 aa, synthetic construct
PLNGSVHLYAQAQTGLVQN

SEQ ID NO: 661 - protein, 19 aa, synthetic construct
PLNGAVHIYAQAQTGWFQN

SEQ ID NO: 662 - protein, 19 aa, synthetic construct
SLNGAVHLYAQAQIASVQN

SEQ ID NO: 663 - protein, 19 aa, synthetic construct
PLNGAVHLYAQEQTVSVQN

SEQ ID NO: 664 - protein, 19 aa, synthetic construct
PLNGAVHLYAQAQTMQVQT

SEQ ID NO: 665 - protein, 19 aa, synthetic construct
HLNGAVHLYAQAQTGWVQN

SEQ ID NO: 666 - protein, 19 aa, synthetic construct
PLNGAVHLYAQAQTGQVQN

SEQ ID NO: 667 - protein, 19 aa, synthetic construct
QLNGAVHLYAQAQTGWVQD

SEQ ID NO: 668 - protein, 19 aa, synthetic construct
PLNGAVHLYDQAQVAQVQN

SEQ ID NO: 669 - protein, 19 aa, synthetic construct
PLNGAVHLYAQAQTSPVKN

SEQ ID NO: 670 - protein, 19 aa, synthetic construct
PLNGAIHLYAQAQTSPVQN

SEQ ID NO: 671 - protein, 19 aa, synthetic construct
PLNGSVHLYAQAQTAMVQN

SEQ ID NO: 672 - protein, 19 aa, synthetic construct
PLNGAVHLYAQAQLSQVQT

SEQ ID NO: 673 - protein, 19 aa, synthetic construct
PLNGAVHLYAQAQTGSVLN

SEQ ID NO: 674 - protein, 19 aa, synthetic construct
PLNGAIHLYAQAQTASVQN

SEQ ID NO: 675 - protein, 19 aa, synthetic construct
PLNGAVHLYAQAQTNGVQN

SEQ ID NO: 676 - protein, 19 aa, synthetic construct
PLNGSVHLYAQAQTGWVQY

SEQ ID NO: 677 - protein, 19 aa, synthetic construct
PLNGALHLYAQAQTSPVQN

SEQ ID NO: 678 - protein, 19 aa, synthetic construct
ALNGAVHLYAQAQTGWVQT

SEQ ID NO: 679 - protein, 19 aa, synthetic construct
PLNGAVHLYAQAQTGWVKK

SEQ ID NO: 680 - protein, 19 aa, synthetic construct
QLNGAVHLYAQAQTGWVQN

SEQ ID NO: 681 - protein, 19 aa, synthetic construct
PLNGDVHLYAQAQTVAVQN

SEQ ID NO: 682 - protein, 19 aa, synthetic construct
PLNGGVHLYAQAQPGWVQN

SEQ ID NO: 683 - protein, 19 aa, synthetic construct
PLNGAVHLYAQAQAAAVQN

SEQ ID NO: 684 - protein, 19 aa, synthetic construct
PLNGAVHLYAQAQSAVVQN

SEQ ID NO: 685 - protein, 19 aa, synthetic construct
TLNGAVHLYAQAQRSSVQN

SEQ ID NO: 686 - protein, 19 aa, synthetic construct
PLNGAVHLYAQAQPGWVQH

SEQ ID NO: 687 - protein, 19 aa, synthetic construct
PLDGAVHLYAQAQTLSVQN

SEQ ID NO: 688 - protein, 19 aa, synthetic construct
PLNGAVHLYAQAQTASDQN

SEQ ID NO: 689 - protein, 19 aa, synthetic construct
PLNGAVHLYAQAQLSGVQN

SEQ ID NO: 690 - protein, 19 aa, synthetic construct
TLNGAVHLYAQAQTVAVQN

SEQ ID NO: 691 - protein, 19 aa, synthetic construct
PLNGAVHLYAQEQVASVQN

SEQ ID NO: 692 - protein, 19 aa, synthetic construct
PVNGAVHLYAQAQTGWAQN

SEQ ID NO: 693 - protein, 19 aa, synthetic construct
PLNGAVHLYAQAQSSRVQN

SEQ ID NO: 694 - protein, 19 aa, synthetic construct
PLNGSVHLYAQAQLGSVQN

SEQ ID NO: 695 - protein, 19 aa, synthetic construct
PLNGAVHLYAQAQSPPVQN

SEQ ID NO: 696 - protein, 19 aa, synthetic construct
PLNGAVHHYAQAQTTSVQN

SEQ ID NO: 697 - protein, 19 aa, synthetic construct
PLNGAVHLYDQAQSTPVQN

SEQ ID NO: 698 - protein, 19 aa, synthetic construct
QLNGAVHLYAQAQTGWVRN

SEQ ID NO: 699 - protein, 19 aa, synthetic construct
PLNGAVHLYAQAQVQPVQT

SEQ ID NO: 700 - protein, 19 aa, synthetic construct
PLNGAVHLYAQAQTSSVKN

SEQ ID NO: 701 - protein, 19 aa, synthetic construct
PLNGALHLYAQAQTASVQN

SEQ ID NO: 702 - protein, 19 aa, synthetic construct
PLNGAVHHYAQAQSAPVQN

SEQ ID NO: 703 - protein, 19 aa, synthetic construct
PLNGSVHLYAQAQTGWVHN

SEQ ID NO: 704 - protein, 19 aa, synthetic construct
PLNGAVHLYAQAQLSPLQN

SEQ ID NO: 705 - protein, 19 aa, synthetic construct
PLNGAVHLYAKAQVTPVQN

SEQ ID NO: 706 - protein, 19 aa, synthetic construct
PLNGAVNLYAQAQTQPVQN

SEQ ID NO: 707 - protein, 19 aa, synthetic construct
SLNGAVHLYAQAQTGLVQN

SEQ ID NO: 708 - protein, 19 aa, synthetic construct
PLDGSVHLYAQAQTGGVQN

SEQ ID NO: 709 - protein, 19 aa, synthetic construct
PLNGAVHLYDQAQTLPVQN

SEQ ID NO: 710 - protein, 19 aa, synthetic construct
PLNGAVHLYAQAQVSQVQK

SEQ ID NO: 711 - protein, 19 aa, synthetic construct
PLNGAVHLYAQAQLVGVQN

SEQ ID NO: 712 - protein, 19 aa, synthetic construct
PLNGAVHLYAQEQTSSVQN

SEQ ID NO: 713 - protein, 19 aa, synthetic construct
PLNGAVHIYAQAQTVAVQN

SEQ ID NO: 714 - protein, 19 aa, synthetic construct
PLNGAVNLYAQAQVTPVQN

SEQ ID NO: 715 - protein, 19 aa, synthetic construct
TLNGAVHLYAQAQTMSVQN

SEQ ID NO: 716 - protein, 19 aa, synthetic construct
TLNGAVHLYAQAQTLAVQN

SEQ ID NO: 717 - protein, 19 aa, synthetic construct
PINGAVHLYAQAQVAQVQN

SEQ ID NO: 718 - protein, 19 aa, synthetic construct
PLNGQVHLYAQAQTGWVQN

SEQ ID NO: 719 - protein, 19 aa, synthetic construct
QLNGAVHLYAQAQTGGVQN

SEQ ID NO: 720 - protein, 19 aa, synthetic construct
PLNGAVHLYAQAQTLSVKN

SEQ ID NO: 721 - protein, 19 aa, synthetic construct
PLNGTVHLYAQAQTGWDQN

SEQ ID NO: 722 - protein, 19 aa, synthetic construct
PLNGAVHLYAQAQTGWFQK

SEQ ID NO: 723 - protein, 19 aa, synthetic construct
ALNGAVHLYAQAQTSKVQN

SEQ ID NO: 724 - protein, 19 aa, synthetic construct
ALNGTVHLYAQAQTGWVQN

SEQ ID NO: 725 - protein, 19 aa, synthetic construct
PLNGAVPLYAQAQTGWVQH

SEQ ID NO: 726 - protein, 19 aa, synthetic construct
PLNGAVHLYAQAKTGWVQK

SEQ ID NO: 727 - protein, 19 aa, synthetic construct
PLNGAVHLYAQAQTPAVQN

SEQ ID NO: 728 - protein, 19 aa, synthetic construct
PLNGAVHLYAQAQTVGVKN

SEQ ID NO: 729 - protein, 19 aa, synthetic construct
PLNGAVHLYAQEQTGWFQN

SEQ ID NO: 730 - protein, 19 aa, synthetic construct
PLNGAVHLYAQAQKGWDQN

SEQ ID NO: 731 - protein, 19 aa, synthetic construct
PLNGAVHLYDQAQTSAVQN

SEQ ID NO: 732 - protein, 19 aa, synthetic construct
PLDGAVHLYAQAQTGWVQK

SEQ ID NO: 733 - protein, 19 aa, synthetic construct
PLNGAVHLYAQAQTAWVLN

SEQ ID NO: 734 - protein, 19 aa, synthetic construct
PLNGSVHLYAQAQTGWVLN

SEQ ID NO: 735 - protein, 19 aa, synthetic construct
QLNGAVHLYAQAQTGWVQT

SEQ ID NO: 736 - protein, 19 aa, synthetic construct
PLNGAVHLYAQAQVPPVQN

SEQ ID NO: 737 - protein, 19 aa, synthetic construct
PVNGAVHLYAQAQVQSVQN

SEQ ID NO: 738 - protein, 19 aa, synthetic construct
QLNGAVHLYAQAQTKSVQN

SEQ ID NO: 739 - protein, 19 aa, synthetic construct
PVNGAVHLYAQAQTSSVQN

SEQ ID NO: 740 - protein, 19 aa, synthetic construct
PLNGAVHLYAQAQATGVQN

SEQ ID NO: 741 - protein, 19 aa, synthetic construct
TLNGAVHLYAQAQLSQVQN

SEQ ID NO: 742 - protein, 19 aa, synthetic construct
PLDGAVHLYAQAQTVSVQN

SEQ ID NO: 743 - protein, 19 aa, synthetic construct
SLNGAVHLYAQAQTKPVQN

SEQ ID NO: 744 - protein, 19 aa, synthetic construct
PLKGAVHLYAQAQSAPVQN

SEQ ID NO: 745 - protein, 19 aa, synthetic construct
PLNGAVHLYAQAKTGWVKN

SEQ ID NO: 746 - protein, 19 aa, synthetic construct
PLNGSVHLYAQAQTLGVQN

SEQ ID NO: 747 - protein, 19 aa, synthetic construct
PLKGAVHLYAQAQLAPVQN

SEQ ID NO: 748 - protein, 19 aa, synthetic construct
PLNGSVHLYAQAQTGWVQK

SEQ ID NO: 749 - protein, 19 aa, synthetic construct
PLNGAVHLYAQAQTGGVQI

SEQ ID NO: 750 - protein, 19 aa, synthetic construct
PLNGAVHLYAQPQTGWVQT

SEQ ID NO: 751 - protein, 19 aa, synthetic construct
PLNGAVHLYAQAQTGWVLN

SEQ ID NO: 752 - protein, 19 aa, synthetic construct
PLNGAVHLYDQAQLTPVQN

SEQ ID NO: 753 - protein, 19 aa, synthetic construct
QLNGAVHLYAQAQTATVQN

SEQ ID NO: 754 - protein, 19 aa, synthetic construct
PLNGAVHLYAQAQTAWGQN

SEQ ID NO: 755 - protein, 19 aa, synthetic construct
PLNGAVHLYAQAQTGWVHN

SEQ ID NO: 756 - protein, 19 aa, synthetic construct
PLKGAVHLYAQAQSSPVQN

SEQ ID NO: 757 - protein, 19 aa, synthetic construct
PLNGAVHLYAQAQLGSVQT

SEQ ID NO: 758 - protein, 19 aa, synthetic construct
PLNGAVHLYAQAQSANVQN

SEQ ID NO: 759 - protein, 19 aa, synthetic construct
PLNGGVHLYAQAQTGSVQN

SEQ ID NO: 760 - protein, 19 aa, synthetic construct
PLNGAVHLYDQAQRSSVQN

SEQ ID NO: 761 - protein, 19 aa, synthetic construct
PLNGAVHLYAQAQTGGVQD

SEQ ID NO: 762 - protein, 19 aa, synthetic construct
PLNGAVHLYAQAQTMAVKN

SEQ ID NO: 763 - protein, 19 aa, synthetic construct
PLNGAVHLYAQAQTASVKN

SEQ ID NO: 764 - protein, 19 aa, synthetic construct
PLNGAVHLYAQAQSSPVQK

SEQ ID NO: 765 - protein, 19 aa, synthetic construct
PLNGAVHLYAQAQTGWVKN

SEQ ID NO: 766 - protein, 19 aa, synthetic construct
ALNGAVHLYAQAQTGGVQN

SEQ ID NO: 767 - protein, 19 aa, synthetic construct
PLNGAVHLYAQAQTGTVQT

SEQ ID NO: 768 - protein, 19 aa, synthetic construct
PLNGAVHLYAQAQTGWVQI

SEQ ID NO: 769 - protein, 19 aa, synthetic construct
PINGAVHLYAQAQTSLVQN

SEQ ID NO: 770 - protein, 19 aa, synthetic construct
PLNGAVHIYAQAQVAQVQN

SEQ ID NO: 771 - protein, 19 aa, synthetic construct
PLNGAVHLYAQAQTVWVKN

SEQ ID NO: 772 - protein, 19 aa, synthetic construct
TLNGAVHLYAQAQLMPVQN

SEQ ID NO: 773 - protein, 19 aa, synthetic construct
PLNGAVHIYAQAQTAPVQN

SEQ ID NO: 774 - protein, 19 aa, synthetic construct
PLYGAVHLYAQAQTASVQN

SEQ ID NO: 775 - protein, 19 aa, synthetic construct
TLNGAVHLYAQAQLGPVQN

SEQ ID NO: 776 - protein, 19 aa, synthetic construct
PLDGAVHLYAQAQTGWVKN

SEQ ID NO: 777 - protein, 19 aa, synthetic construct
PLKGAVHLYAQAQVSPVQN

SEQ ID NO: 778 - protein, 19 aa, synthetic construct
PLNGAVHLYAQAQSQQVQN

SEQ ID NO: 779 - protein, 19 aa, synthetic construct
PLNGAVDLYAQAQLSPVQN

SEQ ID NO: 780 - protein, 19 aa, synthetic construct
PLNGAVHLYAQAQVGSVQT

SEQ ID NO: 781 - protein, 19 aa, synthetic construct
PLNGTVHLYAQAQTGWAQN

SEQ ID NO: 782 - protein, 19 aa, synthetic construct
ALNGAVHLYAQAQTGLVQT

SEQ ID NO: 783 - protein, 19 aa, synthetic construct
PLNGAVHLYAQAQSSMVQN

SEQ ID NO: 784 - protein, 19 aa, synthetic construct
PLNGAVHLYAKAQTAGVQN

SEQ ID NO: 785 - protein, 19 aa, synthetic construct
PLNGAVHLYAHAQTGWVQK

SEQ ID NO: 786 - protein, 19 aa, synthetic construct
PLNGAVHLYAQAQTSPVQK

SEQ ID NO: 787 - protein, 19 aa, synthetic construct
PLNGAVHLYAQAQAVGVQN

SEQ ID NO: 788 - protein, 19 aa, synthetic construct
PLNGAVPLYAQAQTGWGQN

SEQ ID NO: 789 - protein, 19 aa, synthetic construct
PLNGTVHLYAQAQLGSVQN

SEQ ID NO: 790 - protein, 19 aa, synthetic construct
QLNGAVHLYAQAQTGWVQH

SEQ ID NO: 791 - protein, 19 aa, synthetic construct
PLNGSVHLYAQAQTGWVKN

SEQ ID NO: 792 - protein, 19 aa, synthetic construct
PLNGAVHLYDQAQVAPVQN

SEQ ID NO: 793 - protein, 19 aa, synthetic construct
PLNGAVNLYAQAQVSSVQN

SEQ ID NO: 794 - protein, 19 aa, synthetic construct
PLNGAVHLYAQAQTLPVQK

SEQ ID NO: 795 - protein, 19 aa, synthetic construct
PLNGSVHLYAQAQTASVQN

SEQ ID NO: 796 - protein, 19 aa, synthetic construct
ALNGAVHLYAQAQTGWGQN

SEQ ID NO: 797 - protein, 19 aa, synthetic construct
PLNGAVHLYAQAQTGWGQN

SEQ ID NO: 798 - protein, 19 aa, synthetic construct
PLNGAAHLYAQAQTSPVQN

SEQ ID NO: 799 - protein, 19 aa, synthetic construct
PLNGAVHLYAQAQTGRVQH

SEQ ID NO: 800 - protein, 19 aa, synthetic construct
PINGAVHLYAQAQTGWVQS

SEQ ID NO: 801 - protein, 19 aa, synthetic construct
PLNGAVHLYAQAQTPSVQN

SEQ ID NO: 802 - protein, 19 aa, synthetic construct
PLNGAVHLYDQAQTTAVQN

SEQ ID NO: 803 - protein, 19 aa, synthetic construct
PLNGNVHLYAQAQTGWVQK

SEQ ID NO: 804 - protein, 19 aa, synthetic construct
PLNGAVHLYAQAQTGWVEN

SEQ ID NO: 805 - protein, 19 aa, synthetic construct
PLNGAVNLYAQAQTTPVQN

SEQ ID NO: 806 - protein, 19 aa, synthetic construct
PLNGAVNLYAQAQLSQVQN

SEQ ID NO: 807 - protein, 19 aa, synthetic construct
SLNGAVHLYAQAQVMSVQN

SEQ ID NO: 808 - protein, 19 aa, synthetic construct
QLNGAVHLYAQAQTGWVQS

SEQ ID NO: 809 - protein, 19 aa, synthetic construct
PINGAVHLYAQAQTGWFQN

SEQ ID NO: 810 - protein, 19 aa, synthetic construct
PLNGDVHLYAQAQVSSVQN

SEQ ID NO: 811 - protein, 19 aa, synthetic construct
PLNGGVHLYAQAQTGWVQS

SEQ ID NO: 812 - protein, 19 aa, synthetic construct
PLNGAVNLYAQAQRSTVQN

SEQ ID NO: 813 - protein, 19 aa, synthetic construct
ALNGAVHLYAQAQTGWVQY

SEQ ID NO: 814 - protein, 19 aa, synthetic construct
PLNGAVHHYAQAQTAAVQN

SEQ ID NO: 815 - protein, 19 aa, synthetic construct
PLNGAVHRYAQAQTGWVQH

SEQ ID NO: 816 - protein, 19 aa, synthetic construct
QLNGAVHLYAQAQTGWVHN

SEQ ID NO: 817 - protein, 19 aa, synthetic construct
PLNGAVHLYAQAQRGWVQN

SEQ ID NO: 818 - protein, 19 aa, synthetic construct
PLNGAVHLYAQAQTGSVEN

SEQ ID NO: 819 - protein, 19 aa, synthetic construct
ALNGAVHLYAQAQTGWVHN

SEQ ID NO: 820 - protein, 19 aa, synthetic construct
PLNGAVNLYAQAQTLAVQN

SEQ ID NO: 821 - protein, 19 aa, synthetic construct
PLNGAVHLYAQAQSSLVQN

SEQ ID NO: 822 - protein, 19 aa, synthetic construct
ALNGAVHLYAQAQTGWLQN

SEQ ID NO: 823 - protein, 19 aa, synthetic construct
TLNGAVHLYAQAQTLQVQN

SEQ ID NO: 824 - protein, 19 aa, synthetic construct
PLNGAVHLYDQAQVQSVQN

SEQ ID NO: 825 - protein, 19 aa, synthetic construct
SLNGAVHLYAQAQVTGVQN

SEQ ID NO: 826 - protein, 19 aa, synthetic construct
QLNGAVHLYAQAQSAVVQN

SEQ ID NO: 827 - protein, 19 aa, synthetic construct
PLNGVVHLYAQAQTGWVQT

SEQ ID NO: 828 - protein, 19 aa, synthetic construct
PLNGAVHLYAQAQTAWVKN

SEQ ID NO: 829 - protein, 19 aa, synthetic construct
TLNGAVHLYAQAQTLPVQN

SEQ ID NO: 830 - protein, 19 aa, synthetic construct
ALNGAVHLYAQAQTTGVQN

SEQ ID NO: 831 - protein, 19 aa, synthetic construct
PLNGAVHLYAKAQTMAVQN

SEQ ID NO: 832 - protein, 19 aa, synthetic construct
PLNGAVHLYAQAQTYSVQN

SEQ ID NO: 833 - protein, 19 aa, synthetic construct
PLNGCVHLYAQAQTGWVQN

SEQ ID NO: 834 - protein, 19 aa, synthetic construct
PLNGAVHLYAQAQLAAVQT

SEQ ID NO: 835 - protein, 19 aa, synthetic construct
PLNGAVHLYAQAQTALVKN

SEQ ID NO: 836 - protein, 19 aa, synthetic construct
PLNGAVHLYAKAQTVAVQN

SEQ ID NO: 837 - protein, 19 aa, synthetic construct
PLNGAVHLYAHAQTGWVQT

SEQ ID NO: 838 - protein, 19 aa, synthetic construct
PLNGGVHLYAQAQRGSVQN

SEQ ID NO: 839 - protein, 19 aa, synthetic construct
PLNGAFHLYAQAQTGGVQN

SEQ ID NO: 840 - protein, 19 aa, synthetic construct
PLNGAVHLYALAQTSPVQN

SEQ ID NO: 841 - protein, 19 aa, synthetic construct
PLNGAVHLYAQAQTGWVQY

SEQ ID NO: 842 - protein, 19 aa, synthetic construct
PLNGAVHLYAQAQTLPVQT

SEQ ID NO: 843 - protein, 19 aa, synthetic construct
PLNGAVHLYSQAQTGWFQN

SEQ ID NO: 844 - protein, 19 aa, synthetic construct
PLNGAVHLYAQAQTGLVQH

SEQ ID NO: 845 - protein, 19 aa, synthetic construct
PLNGAVHLYAQAQTPTVQN

SEQ ID NO: 846 - protein, 19 aa, synthetic construct
PLYGAVHLYAQAQTAWVQN

SEQ ID NO: 847 - protein, 19 aa, synthetic construct
PLNGAVHLYAKAQTASVQN

SEQ ID NO: 848 - protein, 19 aa, synthetic construct
PLNGAVHLYAQAQTASVQK

SEQ ID NO: 849 - protein, 19 aa, synthetic construct
PLDGSVHLYAQAQTAWVQN

SEQ ID NO: 850 - protein, 19 aa, synthetic construct
PLNGADHLYAQAQTSSVQN

SEQ ID NO: 851 - protein, 19 aa, synthetic construct
PLNGAVHLYAQAQTSPVQI

SEQ ID NO: 852 - protein, 19 aa, synthetic construct
PLNGAVHLYAQAQIGWVQN

SEQ ID NO: 853 - protein, 19 aa, synthetic construct
PLNGAVHLYAKAQTSTVQN

SEQ ID NO: 854 - protein, 19 aa, synthetic construct
PLNGAVHRYAQAQTGWVQT

SEQ ID NO: 855 - protein, 19 aa, synthetic construct
PLNGAVHLYDQAQTSTVQN

SEQ ID NO: 856 - protein, 19 aa, synthetic construct
QLNGAVHLYAQAQTGLVQN

SEQ ID NO: 857 - protein, 19 aa, synthetic construct
PLNGAVNLYAQAQLGPVQN

SEQ ID NO: 858 - protein, 19 aa, synthetic construct
PLNGAVHLYAQAQTGWDKN

SEQ ID NO: 859 - protein, 19 aa, synthetic construct
PLNGALHLYAQAQTGWVKN

SEQ ID NO: 860 - protein, 19 aa, synthetic construct
PLNGNVHLYAHAQTGWVQN

SEQ ID NO: 861 - protein, 19 aa, synthetic construct
PLNGAVHLYAQAQKSSVQN

SEQ ID NO: 862 - protein, 19 aa, synthetic construct
PLNGAVHLYAQAQTGYVQN

SEQ ID NO: 863 - protein, 19 aa, synthetic construct
PVNGAVHLYAQAQVGSVQN

SEQ ID NO: 864 - protein, 19 aa, synthetic construct
PLNGGVHLYAQAQTGWVKN

SEQ ID NO: 865 - protein, 19 aa, synthetic construct
PLNGAVHLYAQAQRGWVQT

SEQ ID NO: 866 - protein, 19 aa, synthetic construct
PLNGAVNLYAQAQRSLVQN

SEQ ID NO: 867 - protein, 19 aa, synthetic construct
PINGAVHLYAQAQTGWDQN

SEQ ID NO: 868 - protein, 19 aa, synthetic construct
PLNGNVHLYAQAQTGWVQT

SEQ ID NO: 869 - protein, 19 aa, synthetic construct
PLNGAVHLYAKAQTGWFQN

SEQ ID NO: 870 - protein, 19 aa, synthetic construct
PLNGAVHLYAQEQTSTVQN

SEQ ID NO: 871 - protein, 19 aa, synthetic construct
PLNGAVHLYAQAQTGGVEN

SEQ ID NO: 872 - protein, 19 aa, synthetic construct
PLNGAVHLYSQAQTGWVQI

SEQ ID NO: 873 - protein, 19 aa, synthetic construct
SLNGAVHLYAQAQTGLVQK

SEQ ID NO: 874 - protein, 19 aa, synthetic construct
PLNGAVHLYAQAQTGCVRN

SEQ ID NO: 875 - protein, 19 aa, synthetic construct
PLNGADHLYAQAQVTPVQN

SEQ ID NO: 876 - protein, 19 aa, synthetic construct
PLNGAVHLYAPAQTGWVQT

SEQ ID NO: 877 - protein, 19 aa, synthetic construct
PLNGDVHLYAQAQTSAVQN

SEQ ID NO: 878 - protein, 19 aa, synthetic construct
TLNGAVHLYAQAQSSLVQN

SEQ ID NO: 879 - protein, 19 aa, synthetic construct
SLNGAVHLYAQAQRSVVQN

SEQ ID NO: 880 - protein, 19 aa, synthetic construct
SLNGAVHLYAQAQTGWVQS

SEQ ID NO: 881 - protein, 19 aa, synthetic construct
PVNGAVHLYAQAQTGWVQS

SEQ ID NO: 882 - protein, 19 aa, synthetic construct
PLNGAVHLYAQAQLSPVQS

SEQ ID NO: 883 - protein, 19 aa, synthetic construct
PLNGAVHLYAQPQTGWLQN

SEQ ID NO: 884 - protein, 19 aa, synthetic construct
PLNGAVNLYAQAQSAPVQN

SEQ ID NO: 885 - protein, 19 aa, synthetic construct
PLNGTVHLYAQAQTGWVPN

SEQ ID NO: 886 - protein, 19 aa, synthetic construct
PVDGAVHLYAQAQTGSVQN

SEQ ID NO: 887 - protein, 19 aa, synthetic construct
PLNGAVHLYDQAQTAAVQN

SEQ ID NO: 888 - protein, 19 aa, synthetic construct
PLKGAVHLYAQAQTSTVQN

SEQ ID NO: 889 - protein, 19 aa, synthetic construct
PLNGAVHLYAQAQTGPVQT

SEQ ID NO: 890 - protein, 19 aa, synthetic construct
PLNGAVHLYAQAQTVGVQK

SEQ ID NO: 891 - protein, 19 aa, synthetic construct
PLNGAVNLYAQAQTSTVQN

SEQ ID NO: 892 - protein, 19 aa, synthetic construct
PLNGAVHLYARAQTVSVQN

SEQ ID NO: 893 - protein, 19 aa, synthetic construct
PLNGAVHLYAQAQTASGQN

SEQ ID NO: 894 - protein, 19 aa, synthetic construct
PLNGAVHLYAQAQSVSVQN

SEQ ID NO: 895 - protein, 19 aa, synthetic construct
PLNGAVHLYAQAQSGPVQT

SEQ ID NO: 896 - protein, 19 aa, synthetic construct
QLNGAVHLYAQAQTGWGQN

SEQ ID NO: 897 - protein, 19 aa, synthetic construct
PLNGAVHLYAQAQVMSVKN

SEQ ID NO: 898 - protein, 19 aa, synthetic construct
PLNGTVHLYAKAQTGSVQN

SEQ ID NO: 899 - protein, 19 aa, synthetic construct
PLNGAVNLYAQAQTSLVQN

SEQ ID NO: 900 - protein, 19 aa, synthetic construct
PINGAVHLYAQAQTLSVQN

SEQ ID NO: 901 - protein, 19 aa, synthetic construct
PLNGAVHLYAQAQLGSVQK

SEQ ID NO: 902 - protein, 19 aa, synthetic construct
TLNGAVHLYAQAQTAMVQN

SEQ ID NO: 903 - protein, 19 aa, synthetic construct
PLNGAVHLYAQAHLSSVQN

SEQ ID NO: 904 - protein, 19 aa, synthetic construct
PLNGAVHLYAKAQVMSVQN

SEQ ID NO: 905 - protein, 19 aa, synthetic construct
PLNGAVHLYAQAQTGLVLN

SEQ ID NO: 906 - protein, 19 aa, synthetic construct
PLNGGVHLYAQAQTGWVQK

SEQ ID NO: 907 - protein, 19 aa, synthetic construct
PLNGAVHLYAKAQTGWVQK

SEQ ID NO: 908 - protein, 19 aa, synthetic construct
PLNGAVLLYAQAQTASVQN

SEQ ID NO: 909 - protein, 19 aa, synthetic construct
PLNGDVHLYAQAQTMAVQN

SEQ ID NO: 910 - protein, 19 aa, synthetic construct
PLNGAVHLYAKAQTAAVQN

SEQ ID NO: 911 - protein, 19 aa, synthetic construct
PLNGAVHLYAQAQTGLVQN

SEQ ID NO: 912 - protein, 19 aa, synthetic construct
PLNGDVHLYAQAQSSPVQN

SEQ ID NO: 913 - protein, 19 aa, synthetic construct
PLNGAVHLYAQAQTSNVQN

SEQ ID NO: 914 - protein, 19 aa, synthetic construct
ALDGAVHLYAQAQTGSVQN

SEQ ID NO: 915 - protein, 19 aa, synthetic construct
PLNGAVHLYSQAQTSSVQN

SEQ ID NO: 916 - protein, 19 aa, synthetic construct
PLKGAVHLYAQAQLSPVQN

SEQ ID NO: 917 - protein, 19 aa, synthetic construct
LLNGAVHLYAQAQTVSVQN

SEQ ID NO: 918 - protein, 19 aa, synthetic construct
PLNGGVHLYAQAQTGWVQI

SEQ ID NO: 919 - protein, 19 aa, synthetic construct
PLNGAVHLYSQAQTGWVRN

SEQ ID NO: 920 - protein, 19 aa, synthetic construct
PLNGAVHLYAQAQTGWGHN

SEQ ID NO: 921 - protein, 19 aa, synthetic construct
PHNGAVHLYAQAQTTSVQN

SEQ ID NO: 922 - protein, 19 aa, synthetic construct
PLNRAVHLYAQAQTGWVQK

SEQ ID NO: 923 - protein, 19 aa, synthetic construct
PLNGAVHLYDQAQRASVQN

SEQ ID NO: 924 - protein, 19 aa, synthetic construct
PLNGAVHLYSQAQTGWVQN

SEQ ID NO: 925 - protein, 19 aa, synthetic construct
PLNGSVHLYAQAQTGTVQN

SEQ ID NO: 926 - protein, 19 aa, synthetic construct
PLNGAVHLYDQAQTSGVQN

SEQ ID NO: 927 - protein, 19 aa, synthetic construct
PLNGAVHLYAQAKTGWFQN

SEQ ID NO: 928 - protein, 19 aa, synthetic construct
KLDGAVHLYAQAQTGLVQN

SEQ ID NO: 929 - protein, 19 aa, synthetic construct
PLNGAVHLYAQAQSQMVQN

SEQ ID NO: 930 - protein, 19 aa, synthetic construct
TLNGAVHLYAQAQTSVVQN

SEQ ID NO: 931 - protein, 19 aa, synthetic construct
PLNGAVHLYAKAQTGTVQN

SEQ ID NO: 932 - protein, 19 aa, synthetic construct
PLNGAVHLYAQAQTVSVHN

SEQ ID NO: 933 - protein, 19 aa, synthetic construct
PLNGAVHLYAQAQLSSVQT

SEQ ID NO: 934 - protein, 19 aa, synthetic construct
PVNGAVHLYAQAQTGWFQN

SEQ ID NO: 935 - protein, 19 aa, synthetic construct
PLNGAVHLYAQAQTASVRN

SEQ ID NO: 936 - protein, 19 aa, synthetic construct
PLNGDVHLYAQAQTSTVQN

SEQ ID NO: 937 - protein, 19 aa, synthetic construct
PLNGAVHLYAKAQLGSVQN

SEQ ID NO: 938 - protein, 19 aa, synthetic construct
PINGAVHLYAQAQLVPVQN

SEQ ID NO: 939 - protein, 19 aa, synthetic construct
PLNGAVHHYAQAQLGPVQN

SEQ ID NO: 940 - protein, 19 aa, synthetic construct
PLNGAVHLYAPAQTGWVQH

SEQ ID NO: 941 - protein, 19 aa, synthetic construct
PLNGAVHLYAQAQVPAVQN

SEQ ID NO: 942 - protein, 19 aa, synthetic construct
PLNGAVNLYAQAQRLSVQN

SEQ ID NO: 943 - protein, 19 aa, synthetic construct
PLNGAVHLYAQAQTGRVQK

SEQ ID NO: 944 - protein, 19 aa, synthetic construct
PLNGAVLLYAQAQTVSVQN

SEQ ID NO: 945 - protein, 19 aa, synthetic construct
PLNGAVHLYAQAQAMSVQN

SEQ ID NO: 946 - protein, 19 aa, synthetic construct
PLNGAVHLYAQAQTAWVHN

SEQ ID NO: 947 - protein, 19 aa, synthetic construct
PLNGAVHLYAQPQTGWVRN

SEQ ID NO: 948 - protein, 19 aa, synthetic construct
PLNGAVHLYAQEQTGWLQN

SEQ ID NO: 949 - protein, 19 aa, synthetic construct
PLNGAVHLYAKAQTSAVQN

SEQ ID NO: 950 - protein, 19 aa, synthetic construct
PLNGSVHLYAQAQTVWVQN

SEQ ID NO: 951 - protein, 19 aa, synthetic construct
PLNGTVHLYAQAQTGWFQN

SEQ ID NO: 952 - protein, 19 aa, synthetic construct
PLNGAVNLYAQAQVASVQN

SEQ ID NO: 953 - protein, 19 aa, synthetic construct
PLNGAVHLYAQAQTGLVRN

SEQ ID NO: 954 - protein, 19 aa, synthetic construct
PLNGAVNLYAQAQLSTVQN

SEQ ID NO: 955 - protein, 19 aa, synthetic construct
PLNGAVHLYAKAQTQPVQN

SEQ ID NO: 956 - protein, 19 aa, synthetic construct
PLNGTVHLYAQAQTGWGQN

SEQ ID NO: 957 - protein, 19 aa, synthetic construct
PLNGAVHLYAQAQRTLVQT

SEQ ID NO: 958 - protein, 19 aa, synthetic construct
PLNGAVHLYAQAQTGSIQN

SEQ ID NO: 959 - protein, 19 aa, synthetic construct
QLNGAVHLYAQAQTGWDQN

SEQ ID NO: 960 - protein, 19 aa, synthetic construct
PLNGAVHLYAQAQLSSVKN

SEQ ID NO: 961 - protein, 19 aa, synthetic construct
QLNGAVHLYAQAQTVSVQN

SEQ ID NO: 962 - protein, 19 aa, synthetic construct
PLNGAVHLYAQAQTLQVQK

SEQ ID NO: 963 - protein, 19 aa, synthetic construct
TLNGAVHLYAQAQVLPVQN

SEQ ID NO: 964 - protein, 19 aa, synthetic construct
PLNGAVHLYAQAQVGSVKN

SEQ ID NO: 965 - protein, 19 aa, synthetic construct
PLNGAVHLYAQAQLAPLQN

SEQ ID NO: 966 - protein, 19 aa, synthetic construct
QLNGAVHLYAQAQTGSVKN

SEQ ID NO: 967 - protein, 19 aa, synthetic construct
PLNGAVHHYAQAQRSTVQN

SEQ ID NO: 968 - protein, 19 aa, synthetic construct
QLNGSVHLYAQAQTGRVQN

SEQ ID NO: 969 - protein, 19 aa, synthetic construct
TLNGAVHLYAQAQVKPVQN

SEQ ID NO: 970 - protein, 19 aa, synthetic construct
PLNGTVHLYAQAQTGLVQN

SEQ ID NO: 971 - protein, 19 aa, synthetic construct
PLNGAVHLYAQAQTPGVQN

SEQ ID NO: 972 - protein, 19 aa, synthetic construct
PINGAVHLYAQAQTSSVQN

SEQ ID NO: 973 - protein, 19 aa, synthetic construct
PLNGAVHLYAQAQLSAVQT

SEQ ID NO: 974 - protein, 19 aa, synthetic construct
PLNGAVHLYSQAQTGWDQN

SEQ ID NO: 975 - protein, 19 aa, synthetic construct
PLNCAVHLYAQAQTGWVQN

SEQ ID NO: 976 - protein, 19 aa, synthetic construct
PLNGAVNLYAQAQTMPVQN

SEQ ID NO: 977 - protein, 19 aa, synthetic construct
PLNGAVHLYSQAQTVAVQN

SEQ ID NO: 978 - protein, 19 aa, synthetic construct
PLNGTVHLYAQAQTGWVKN

SEQ ID NO: 979 - protein, 19 aa, synthetic construct
PLNGGVHLYAQAQTGWVHN

SEQ ID NO: 980 - protein, 19 aa, synthetic construct
QLNGAVHLYAQAQTGWVQK

SEQ ID NO: 981 - protein, 19 aa, synthetic construct
PLNGAVQLYAQAQTLAVQN

SEQ ID NO: 982 - protein, 19 aa, synthetic construct
PLNGTVHLYAQAQVGSVQN

SEQ ID NO: 983 - protein, 19 aa, synthetic construct
PLNGGVHLYAQAQTGGVQN

SEQ ID NO: 984 - protein, 19 aa, synthetic construct
PLKGAVHLYAQAQVSQVQN

SEQ ID NO: 985 - protein, 19 aa, synthetic construct
PLNGAVHHYAQAQTQPVQN

SEQ ID NO: 986 - protein, 19 aa, synthetic construct
PLNGAVHLYAQAPTGWVQT

SEQ ID NO: 987 - protein, 19 aa, synthetic construct
PLNGAVNLYAQAQTMSVQN

SEQ ID NO: 988 - protein, 19 aa, synthetic construct
PLNGAVHLYAQAQTGVVQN

SEQ ID NO: 989 - protein, 19 aa, synthetic construct
PLNGAVHLYAQAQVPQVQN

SEQ ID NO: 990 - protein, 19 aa, synthetic construct
PHNGAVHLYAQAQTMSVQN

SEQ ID NO: 991 - protein, 19 aa, synthetic construct
QLNGAVHLYAQAQTGWLQN

SEQ ID NO: 992 - protein, 19 aa, synthetic construct
PLNGAVHLYAQAQTGCVQK

SEQ ID NO: 993 - protein, 19 aa, synthetic construct
SLNGAVHLYAQAQTSLVQN

SEQ ID NO: 994 - protein, 19 aa, synthetic construct
PLNGAVHLYAQAQTRWVQT

SEQ ID NO: 995 - protein, 19 aa, synthetic construct
TLNGAVHLYAQAQTVQVQN

SEQ ID NO: 996 - protein, 19 aa, synthetic construct
ALNGAVHLYAQAQKGGVQN

SEQ ID NO: 997 - protein, 19 aa, synthetic construct
PLNGAVHLYDQAQVSGVQN

SEQ ID NO: 998 - protein, 19 aa, synthetic construct
PLNGAVHLYAQAQTGLDQN

SEQ ID NO: 999 - protein, 19 aa, synthetic construct
PLNGAVPLYAQAQTGWVQT

SEQ ID NO: 1000 - protein, 19 aa, synthetic construct
PLNGAVHLYAQAQVSSVHN

SEQ ID NO: 1001 - protein, 19 aa, synthetic construct
TLNGAVHLYAQAQTNSVQN

SEQ ID NO: 1002 - protein, 19 aa, synthetic construct
PLNGAGHLYAQAQLSPVQN

SEQ ID NO: 1003 - protein, 19 aa, synthetic construct
HLNGAVHLYAQAQTGRVQN

SEQ ID NO: 1004 - protein, 19 aa, synthetic construct
PLNGAVHLYDQAQTAMVQN

SEQ ID NO: 1005 - protein, 19 aa, synthetic construct
PINGAVHLYAQAQTGWVQH

SEQ ID NO: 1006 - protein, 19 aa, synthetic construct
PLNGAVQLYAQAQTLQVQN

SEQ ID NO: 1007 - protein, 19 aa, synthetic construct
PLNGAVHLYAQAQKGWVQT

SEQ ID NO: 1008 - protein, 19 aa, synthetic construct
PLNGAVHHYAQAQSTSVQN

SEQ ID NO: 1009 - protein, 19 aa, synthetic construct
PLNGYVHLYAQAQTGWVQN

SEQ ID NO: 1010 - protein, 19 aa, synthetic construct
PLNGAVHIYAQAQVQSVQN

SEQ ID NO: 1011 - protein, 19 aa, synthetic construct
PLIGAVHLYAQAQLSPVQN

SEQ ID NO: 1012 - protein, 19 aa, synthetic construct
TLNGAVHLYAQAQLLPVQN

SEQ ID NO: 1013 - protein, 19 aa, synthetic construct
PLNGAVHLYSQAQTGWVQT

SEQ ID NO: 1014 - protein, 19 aa, synthetic construct
ALNGAVHLYAQAQTQLVQN

SEQ ID NO: 1015 - protein, 19 aa, synthetic construct
PLNGAVHLYAQAQSLPVQN

SEQ ID NO: 1016 - protein, 19 aa, synthetic construct
PVNGAVHLYAQAQTGWVPN

SEQ ID NO: 1017 - protein, 19 aa, synthetic construct
PLNGAVHLYAQAKTVSVQN

SEQ ID NO: 1018 - protein, 19 aa, synthetic construct
PLNGAVHLYAQAQTTSVHN

SEQ ID NO: 1019 - protein, 19 aa, synthetic construct
PVNGAVHLYAQAQTGWVQN

SEQ ID NO: 1020 - protein, 19 aa, synthetic construct
PLNGAVHLYAQAHTGWVQI

SEQ ID NO: 1021 - protein, 19 aa, synthetic construct
PLNGAVRLYAQAQTASVQN

SEQ ID NO: 1022 - protein, 19 aa, synthetic construct
PLNGGVHLYAQAQTGLVQK

SEQ ID NO: 1023 - protein, 19 aa, synthetic construct
PLNGAVNLYAQAQVMSVQN

SEQ ID NO: 1024 - protein, 19 aa, synthetic construct
PLNGAVNLYAQAQSMSVQN

SEQ ID NO: 1025 - protein, 19 aa, synthetic construct
PLNGAVHLYAPAQTGWGQN

SEQ ID NO: 1026 - protein, 19 aa, synthetic construct
QLNGAVHLYAQAQTGWAQN

SEQ ID NO: 1027 - protein, 19 aa, synthetic construct
PLNGAVHLYAQAQTVWVQN

SEQ ID NO: 1028 - protein, 19 aa, synthetic construct
QLNGAVHLYAQAQSVSVQN

SEQ ID NO: 1029 - protein, 19 aa, synthetic construct
PLNGAVHLYAQAQTAQLQN

SEQ ID NO: 1030 - protein, 19 aa, synthetic construct
PLNGAVHLYAQAHVASVQN

SEQ ID NO: 1031 - protein, 19 aa, synthetic construct
PLNGAVHLYAKAQRSTVQN

SEQ ID NO: 1032 - protein, 19 aa, synthetic construct
QLNGAVHLYAQAQTGWVKN

SEQ ID NO: 1033 - protein, 19 aa, synthetic construct
PLNGAVHLYAQAQTRWVKN

SEQ ID NO: 1034 - protein, 19 aa, synthetic construct
PLNGAVHLYAQAQTAWIQN

SEQ ID NO: 1035 - protein, 19 aa, synthetic construct
PLNGAVHLYAQAQLSQVKN

SEQ ID NO: 1036 - protein, 19 aa, synthetic construct
SLNGAVHLYAQAQTGWVQN

SEQ ID NO: 1037 - protein, 19 aa, synthetic construct
PLNGAVHLYAQAQTSTVKN

SEQ ID NO: 1038 - protein, 19 aa, synthetic construct
PLNGAVHLYAQAQALPVQN

SEQ ID NO: 1039 - protein, 19 aa, synthetic construct
PLNGAVHLYDQAQTGWFQN

SEQ ID NO: 1040 - protein, 19 aa, synthetic construct
PLNGAVHVYAQAQTGWFQN

SEQ ID NO: 1041 - protein, 19 aa, synthetic construct
PINGAVHLYAQAQVGSVQN

SEQ ID NO: 1042 - protein, 19 aa, synthetic construct
PLNGSVHLYAQAQTTGVQN

SEQ ID NO: 1043 - protein, 19 aa, synthetic construct
PLNGAVHLYAKAQASPVQN

SEQ ID NO: 1044 - protein, 19 aa, synthetic construct
PLNGSVHLYAQAQKAWVQN

SEQ ID NO: 1045 - protein, 19 aa, synthetic construct
SLNGAVHLYAQAQVLGVQN

SEQ ID NO: 1046 - protein, 19 aa, synthetic construct
PLNGAVHLYAQEQLMPVQN

SEQ ID NO: 1047 - protein, 19 aa, synthetic construct
ALNGAVHLYAQSQTGWVQN

SEQ ID NO: 1048 - protein, 19 aa, synthetic construct
PLNGYVHLYDQAQTGWVQN

SEQ ID NO: 1049 - protein, 19 aa, synthetic construct
PLNGAVHLYAQAQTSMVQT

SEQ ID NO: 1050 - protein, 19 aa, synthetic construct
QLNGAVHLYAQAQISSVQN

SEQ ID NO: 1051 - protein, 19 aa, synthetic construct
PVNGAVHLYAQAQTGWVQT

SEQ ID NO: 1052 - protein, 19 aa, synthetic construct
PLNGAVHLYAQEQTATVQN

SEQ ID NO: 1053 - protein, 19 aa, synthetic construct
PLNGAVYLYAQAQTVSVQN

SEQ ID NO: 1054 - protein, 19 aa, synthetic construct
PLNGNVHLYAQAQTASVQN

SEQ ID NO: 1055 - protein, 19 aa, synthetic construct
PLNGYVHLYAQAQTGLVQN

SEQ ID NO: 1056 - protein, 19 aa, synthetic construct
PLNGAVHLYDQAQTLSVQN

SEQ ID NO: 1057 - protein, 19 aa, synthetic construct
PLNGAVHLYAQAQTSSVQH

SEQ ID NO: 1058 - protein, 19 aa, synthetic construct
SLNGAVHLYAQAQTGWVPN

SEQ ID NO: 1059 - protein, 19 aa, synthetic construct
PLNGAVHLYAQAQTAMVKN

SEQ ID NO: 1060 - protein, 19 aa, synthetic construct
TLNGAVHLYAQAQRLSVQN

SEQ ID NO: 1061 - protein, 19 aa, synthetic construct
ALNGAVHLYAQAQTGWVQK

SEQ ID NO: 1062 - protein, 19 aa, synthetic construct
PLNGAVHLYAKAQTALVQN

SEQ ID NO: 1063 - protein, 19 aa, synthetic construct
QLNGAVHLYAQAQTAKVQN

SEQ ID NO: 1064 - protein, 19 aa, synthetic construct
PLNGADHLYAQAQTTSVQN

SEQ ID NO: 1065 - protein, 19 aa, synthetic construct
PLNGAVHLYAQAQTPWVQN

SEQ ID NO: 1066 - protein, 19 aa, synthetic construct
PLNGTVHLYAQAQTGWIQN

SEQ ID NO: 1067 - protein, 19 aa, synthetic construct
PLNGAVHLYAQAHTGWVQH

SEQ ID NO: 1068 - protein, 19 aa, synthetic construct
PLNGAVHLYARAQTASVQN

SEQ ID NO: 1069 - protein, 19 aa, synthetic construct
TLNGAVHLYAQAQRSLVQN

SEQ ID NO: 1070 - protein, 19 aa, synthetic construct
PLNGAVHLYAQAHTGWVQK

SEQ ID NO: 1071 - protein, 19 aa, synthetic construct
PLNGDVHLYAQAQTAQVQN

SEQ ID NO: 1072 - protein, 19 aa, synthetic construct
TLNGAVHLYAQAQTQPVQN

SEQ ID NO: 1073 - protein, 19 aa, synthetic construct
PLNGAVHLYAQAQTPRVQN

SEQ ID NO: 1074 - protein, 19 aa, synthetic construct
PRNGAVHLYAQAQTMSVQN

SEQ ID NO: 1075 - protein, 19 aa, synthetic construct
PLNGAVHLYAQAHTVSVQN

SEQ ID NO: 1076 - protein, 19 aa, synthetic construct
PVNGAVHLYAQAQTGLVQT

SEQ ID NO: 1077 - protein, 19 aa, synthetic construct
PLNGAVHLYAQAQSSSVQN

SEQ ID NO: 1078 - protein, 19 aa, synthetic construct
PLNGAVHLYAQAQRPPVQN

SEQ ID NO: 1079 - protein, 19 aa, synthetic construct
PLNGAVHLYTQAQVSPVQN

SEQ ID NO: 1080 - protein, 19 aa, synthetic construct
PLNGAVPLYAQAQTTPVQN

SEQ ID NO: 1081 - protein, 19 aa, synthetic construct
ALNGAVHLYAQAQTGWVKN

SEQ ID NO: 1082 - protein, 19 aa, synthetic construct
SLNGAVHLYAQAQTGWVRN

SEQ ID NO: 1083 - protein, 19 aa, synthetic construct
PLNGAVHLYAQAQLAGVKN

SEQ ID NO: 1084 - protein, 19 aa, synthetic construct
PLNGAVHLYAQAQTSPAQN

SEQ ID NO: 1085 - protein, 19 aa, synthetic construct
PLNGAVHLYAKAQLSSVQN

SEQ ID NO: 1086 - protein, 19 aa, synthetic construct
PLNGAVHLYAQAQRSPVQT

SEQ ID NO: 1087 - protein, 19 aa, synthetic construct
PLNGAVHLYAHAQTMSVQN

SEQ ID NO: 1088 - protein, 19 aa, synthetic construct
PLNGNVHLYAQAQTGWVKN

SEQ ID NO: 1089 - protein, 19 aa, synthetic construct
PLNGAVHLYAQAQTGWVPH

SEQ ID NO: 1090 - protein, 19 aa, synthetic construct
PLNGAVHLYAQAQPGWGQN

SEQ ID NO: 1091 - protein, 19 aa, synthetic construct
PLNGVVHLYAQAQTVSVQN

SEQ ID NO: 1092 - protein, 19 aa, synthetic construct
PLNGDVHLYAQAQTSSVQN

SEQ ID NO: 1093 - protein, 19 aa, synthetic construct
PLNGAVHIYAQAQTLSVQN

SEQ ID NO: 1094 - protein, 19 aa, synthetic construct
PLNGAVHLYAQAQIPPVQN

SEQ ID NO: 1095 - protein, 19 aa, synthetic construct
SLNGAVHLYAQAQTGWVQH

SEQ ID NO: 1096 - protein, 19 aa, synthetic construct
PLNAAVHLYAQAQTGWDQN

SEQ ID NO: 1097 - protein, 19 aa, synthetic construct
PLNGAVHRYAQAQTTSVQN

SEQ ID NO: 1098 - protein, 19 aa, synthetic construct
PLNGSVHLYAQAQPGSVQN

SEQ ID NO: 1099 - protein, 19 aa, synthetic construct
PLDGAVHLYAQAQTGWVEN

SEQ ID NO: 1100 - protein, 19 aa, synthetic construct
PLNGAVHLYAQAQTGRVKN

SEQ ID NO: 1101 - protein, 19 aa, synthetic construct
PLNGAVHLYAQAQTGRLQN

SEQ ID NO: 1102 - protein, 19 aa, synthetic construct
PLNGSVHLYAQAQTARVQN

SEQ ID NO: 1103 - protein, 19 aa, synthetic construct
PLNGAVHLYDQAQLSSVQN

SEQ ID NO: 1104 - protein, 19 aa, synthetic construct
ALNGAVHLYAQAQTRLVQN

SEQ ID NO: 1105 - protein, 19 aa, synthetic construct
PLNGAVNLYAQAQTAQVQN

SEQ ID NO: 1106 - protein, 19 aa, synthetic construct
PLNGAVHLYAQAQLSSVQH

SEQ ID NO: 1107 - protein, 19 aa, synthetic construct
PLNGAVHLYAQAHTGPVQN

SEQ ID NO: 1108 - protein, 19 aa, synthetic construct
PLKGAVHLYAQAQTLSVQN

SEQ ID NO: 1109 - protein, 19 aa, synthetic construct
ALNGAVHLYAQAQKAWVQN

SEQ ID NO: 1110 - protein, 19 aa, synthetic construct
PLNGAVHLYAQAQAGWVQT

SEQ ID NO: 1111 - protein, 19 aa, synthetic construct
PLNGAVHLYAQAQTGLVQS

SEQ ID NO: 1112 - protein, 19 aa, synthetic construct
PLNGAVHLYAQAQTGCVQI

SEQ ID NO: 1113 - protein, 19 aa, synthetic construct
QLNGAVHLYAQAQPGWVQN

SEQ ID NO: 1114 - protein, 19 aa, synthetic construct
PLNGAVHLYAQAQRPGVQN

SEQ ID NO: 1115 - protein, 19 aa, synthetic construct
PLNGAVHLYAQAQTAAVQH

SEQ ID NO: 1116 - protein, 19 aa, synthetic construct
PLNGADHLYAQAQTMPVQN

SEQ ID NO: 1117 - protein, 19 aa, synthetic construct
PLNGAVHLYAKAQTGWVQT

SEQ ID NO: 1118 - protein, 19 aa, synthetic construct
QLNGAVHLYAQAQKAWVQN

SEQ ID NO: 1119 - protein, 19 aa, synthetic construct
PLNGAVHLYAQAQTGCDQN

SEQ ID NO: 1120 - protein, 19 aa, synthetic construct
PLNGTVHLYAQEQTGSVQN

SEQ ID NO: 1121 - protein, 19 aa, synthetic construct
PLNGAVNLYAQAQSSLVQN

SEQ ID NO: 1122 - protein, 19 aa, synthetic construct
ALNGAVHLYAQAQTGWVEN

SEQ ID NO: 1123 - protein, 19 aa, synthetic construct
PLNGTVHLYAQAQTGWVQY

SEQ ID NO: 1124 - protein, 19 aa, synthetic construct
PINGAVHLYAQAQTGWVQK

SEQ ID NO: 1125 - protein, 19 aa, synthetic construct
PLNGAVHLYAQAQTGRVRN

SEQ ID NO: 1126 - protein, 19 aa, synthetic construct
PLNGAVHLYAQAQTGRDQN

SEQ ID NO: 1127 - protein, 19 aa, synthetic construct
QLNGAVHLYAQAQSALVQN

SEQ ID NO: 1128 - protein, 19 aa, synthetic construct
PLNGVVHLYAQAQTGWVQK

SEQ ID NO: 1129 - protein, 19 aa, synthetic construct
PLNGAVHLYAQAHTGWGQN

SEQ ID NO: 1130 - protein, 19 aa, synthetic construct
PLNGDVHLYAQAQRSLVQN

SEQ ID NO: 1131 - protein, 19 aa, synthetic construct
PLNGNVHLYAQAQTVWVQN

SEQ ID NO: 1132 - protein, 19 aa, synthetic construct
PLNGAVHLYAQAPTGWVQH

SEQ ID NO: 1133 - protein, 19 aa, synthetic construct
PLNGAVHLYSQAQTGWGQN

SEQ ID NO: 1134 - protein, 19 aa, synthetic construct
ALNGSVHLYAQAQTGWVQT

SEQ ID NO: 1135 - protein, 19 aa, synthetic construct
PLNGAVQLYAQAQRSTVQN

SEQ ID NO: 1136 - protein, 19 aa, synthetic construct
PLNGTVHLYAQAQTGTVQN

SEQ ID NO: 1137 - protein, 19 aa, synthetic construct
PLNGTVHLYAQAQTGWVQI

SEQ ID NO: 1138 - protein, 19 aa, synthetic construct
QLNGYVHLYAQAQTGWVQN

SEQ ID NO: 1139 - protein, 743 aa, Adeno-associated virus
MAADGYLPDWLEDNLSEGIREWWALKPGAPQPKANQQHQDNARGLVLPGYKYLGPGNGLDKGEPVNAADAAALEHDKAYDQQLKAGDNPYLKYNHADAEFQERLKEDTSFGGNLGRAVFQAKKRLLEPLGLVEEAAKTAPGKKRPVEQSPQEPDSSAGIGKSGAQPAKKRLNFGQTGDTESVPDPQPIGEPPAAPSGVGSLTMASGGGAPVADNNEGADGVGSSSGNWHCDSQWLGDRVITTSTRTWALPTYNNHLYKQISNSTSGGSSNDNAYFGYSTPWGYFDFNRFHCHFSPRDWQRLINNNWGFRPKRLNFKLFNIQVKEVTDNNGVKTIANNLTSTVQVFTDSDYQLPYVLGSAHEGCLPPFPADVFMIPQYGYLTLNDGSQAVGRSSFYCLEYFPSQMLRTGNNFQFSYEFENVPFHSSYAHSQSLDRLMNPLIDQYLYYLSKTINGSGQNQQTLKFSVAGPSNMAVQGRNYIPGPSYRQQRVSTTVTQNNNSEFAWPGASSWALNGRNSLMNPGPAMASHKEGEDRFFPLSGSLIFGKQGTGRDNVDADKVMITNEEEIKTTNPVATESYGQVATNHQSDGTLAVPFKAQAQTGWVQNQGILPGMVWQDRDVYLQGPIWAKIPHTDGNFHPSPLMGGFGMKHPPPQILIKNTPVPADPPTAFNKDKLNSFITQYSTGQVSVEIEWELQKENSKRWNPEIQYTSNYYKSNNVEFAVNTEGVYSEPRPIGTRYLTRNL

SEQ ID NO: 1140 - protein, 115 aa, synthetic construct
EVQLVESGGGLVQAGGSLRLSCAASGFTFSDYSMNWVRQAPGKGLEWVSYIRSSSSIIYYADSVKGRFTISRDNAKNSLHLQMNSLRDEDTAVYYCARRGHFDYWGQGTLVTVSS

SEQ ID NO: 1141 - protein, 115 aa, synthetic construct
EVQLVESGGGLVQPGGSLRLSCAASGFTFSSYSMNWVRQAPGKGLEWVSYIRSSSSTIYYADSVKGRFTISRDNAKKSLYLQMNSLRDEDTAVYYCARRSIADYWGQGTLVTVSS

SEQ ID NO: 1142 - protein, 115 aa, synthetic construct
EVQLVESGGGLVQPGGSLRLSCAASGFTFSSYTMNWVRQAPGKGLEWVSYISSSSSTIYYADSVKGRFTISRDNAKNSLYLQMNSLRDEDTAVYYCASLGRGDCWGQGTLVTVSS

SEQ ID NO: 1143 - protein, 114 aa, synthetic construct
QVQLQESGPGLVKPSETLSLTCTVSGGSISNYYWTWIRQPAGKGLEWIGRVYTSGSANYNPSLKSRVTMSVDTSKNQFSLTLSSVTAADTAVYYCARDRGLYYWGQGTLVTVSS

SEQ ID NO: 1144 - protein, 118 aa, synthetic construct
EVQLLESGGGLVQPGGSLRLSCAASGFTYSSYAMSWVRRAPGKGLEWISIISGSSSITYYADSMKGRFTISRDNSKNTLFLQMNSLRAEDTAVYYCAKGGRYGYFQHWGQGTLVTVSS

SEQ ID NO: 1145 - protein, 119 aa, synthetic construct
QITLKESGPTLVKPTQTLTLTCTLSGFSLSTSEVGVGWIRQPPGKALEWLAIIYWNDHKRYSPSLKNRLTFTKDTSKNQVVLTMTNMDPVDTATYYCARRVTGEGFDPWGQGTLVTVSS

SEQ ID NO: 1146 - protein, 736 aa, synthetic construct
MAADGYLPDWLEDNLSEGIREWWALKPGAPQPKANQQHQDNARGLVLPGYKYLGPGNGLDKGEPVNAADAAALEHDKAYDQQLKAGDNPYLKYNHADAEFQERLKEDTSFGGNLGRAVFQAKKRLLEPLGLVEEAAKTAPGKKRPVEQSPQEPDSSAGIGKSGAQPAKKRLNFGQTGDTESVPDPQPIGEPPAAPSGVGSLTMASGGGAPVADNNEGADGVGSSSGNWHCDSQWLGDRVITTSTRTWALPTYNNHLYKQISNSTSGGSSNDNAYFGYSTPWGYFDFNRFHCHFSPRDWQRLINNNWGFRPKRLNFKLFNIQVKEVTDNNGVKTIANNLTSTVQVFTDSDYQLPYVLGSAHEGCLPPFPADVFMIPQYGYLTLNDGSQAVGRSSFYCLEYFPSQMLRTGNNFQFSYEFENVPFHSSYAHSQSLDRLMNPLIDQYLYYLSRTINGSGQNQQTLKFSVAGPSNMAVQGRNYIPGPSYRQQRVSTTVTQNNNSEFAWPGASSWALNGRNSLMNPGPAMASHKEGEDRFFPLSGSLIFGKQGTGRDNVDADKVMITNEEEIKTTNPVATESYGQVATNHQSAQAQAQTGWVQNQGILPGMVWQDRDVYLQGPIWAKIPHTDGNFHPSPLMGGFGMKHPPPQILIKNTPVPADPPTAFNKDKLNSFITQYSTGQVSVEIEWELQKENSKRWNPEIQYTSNYYKSNNVEFAVNTEGVYSEPRPIGTRYLTRNL

SEQ ID NO: 1147 - protein, 743 aa, synthetic construct
MAADGYLPDWLEDNLSEGIREWWALKPGAPQPKANQQHQDNARGLVLPGYKYLGPGNGLDKGEPVNAADAAALEHDKAYDQQLKAGDNPYLKYNHADAEFQERLKEDTSFGGNLGRAVFQAKKRLLEPLGLVEEAAKTAPGKKRPVEQSPQEPDSSAGIGKSGAQPAKKRLNFGQTGDTESVPDPQPIGEPPAAPSGVGSLTMASGGGAPVADNNEGADGVGSSSGNWHCDSQWLGDRVITTSTRTWALPTYNNHLYKQISNSTSGGSSNDNAYFGYSTPWGYFDFNRFHCHFSPRDWQRLINNNWGFRPKRLNFKLFNIQVKEVTDNNGVKTIANNLTSTVQVFTDSDYQLPYVLGSAHEGCLPPFPADVFMIPQYGYLTLNDGSQAVGRSSFYCLEYFPSQMLRTGNNFQFSYEFENVPFHSSYAHSQSLDRLMNPLIDQYLYYLSKTINGSGQNQQTLKFSVAGPSNMAVQGRNYIPGPSYRQQRVSTTVTQNNNSEFAWPGASSWALNGRNSLMNPGPAMASHKEGEDRFFPLSGSLIFGKQGTGRDNVDADKVMITNEEEIKTTNPVATESYGQVATNHQSDGTGSTTGWAQAQTGWVQNQGILPGMVWQDRDVYLQGPIWAKIPHTDGNFHPSPLMGGFGMKHPPPQILIKNTPVPADPPTAFNKDKLNSFITQYSTGQVSVEIEWELQKENSKRWNPEIQYTSNYYKSNNVEFAVNTEGVYSEPRPIGTRYLTRNL

SEQ ID NO: 1148 - DNA, 2232 bp, synthetic construct
  source 1..2232: mol_type = other DNA
atggctgccgatggttatcttccagattggctcgaggacaaccttagtgaaggaattcgcgagtggtgggctttgaaacctggagcccctcaacccaaggcaaatcaacaacatcaagacaacgctcgaggtcttgtgcttccgggttacaaataccttggacccggcaacggactcgacaagggggagccggtcaacgcagcagacgcggcggccctcgagcacgacaaggcctacgaccagcagctcaaggccggagacaacccgtacctcaagtacaaccacgccgacgccgagttccaggagcggctcaaagaagatacgtcttttgggggcaacctcgggcgagcagtcttccaggccaaaaagaggcttcttgaacctcttggtctggttgaggaagcggctaagacggctcctggaaagaagaggcctgtagagcagtctcctcaggaaccggactcctccgcgggtattggcaaatcgggtgcacagcccgctaaaaagagactcaatttcggtcagactggcgacacagagtcagtcccagaccctcaaccaatcggagaacctcccgcagccccctcaggtgtgggatctcttacaatggcttcaggtggtggcgcaccagtggcagacaataacgaaggtgccgatggagtgggtagttcctcgggaaattggcattgcgattcccaatggctgggggacagagtcatcaccaccagcacccgaacctgggccctgcccacctacaacaatcacctctacaagcaaatctccaacagcacatctggaggatcttcaaatgacaacgcctacttcggctacagcaccccctgggggtattttgacttcaacagattccactgccacttctcaccacgtgactggcagcgactcatcaacaacaactggggattccggcctaagcgactcaacttcaagctcttcaacattcaggtcaaagaggttacggacaacaatggagtcaagaccatcgccaataaccttaccagcacggtccaggtcttcacggactcagactatcagctcccgtacgtgctcgggtcggctcacgagggctgcctcccgccgttcccagcggacgttttcatgattcctcagtacgggtatctgacgcttaatgatggaagccaggccgtgggtcgttcgtccttttactgcctggaatatttcccgtcgcaaatgctaagaacgggtaacaacttccagttcagctacgagtttgagaacgtacctttccatagcagctacgctcacagccaaagcctggaccgactaatgaatccactcatcgaccaatacttgtactatctctcaaagactattaacggttctggacagaatcaacaaacgctaaaattcagtgtggccggacccagcaacatggctgtccagggaagaaactacatacctggacccagctaccgacaacaacgtgtctcaaccactgtgactcaaaacaacaacagcgaatttgcttggcctggagcttcttcttgggctctcaatggacgtaatagcttgatgaatcctggacctgctatggccagccacaaagaaggagaggaccgtttctttcctttgtctggatctttaatttttggcaaacaaggaactggaagagacaacgtggatgcggacaaagtcatgataaccaacgaagaagaaattaaaactactaacccggtagcaacggagtcctatggacaagtggccacaaaccaccagagtgacggaacaggaagcacaacaggatgggcacaggcgcagaccggctgggttcaaaaccaaggaatacttccgggtatggtttggcaggacagagatgtgtacctgcaaggacccatttgggccaaaattcctcacacggacggcaactttcacccttctccgctgatgggagggtttggaatgaagcacccgcctcctcagatcctcatcaaaaacacacctgtacctgccgatcctccaacggccttcaacaaggacaagctgaactctttcatcacccagtattctactggccaagtcagcgtggagatcgagtgggagctgcagaaggaaaacagcaagcggtggaacccggagatccagtacacttccaactattacaagtctaataatgttgaatttgctgttaatactgaaggtgtatatagtgaaccccgccccattggcaccagatacctgactcgtaatctgtaa

SEQ ID NO: 1149 - protein, 19 aa, synthetic construct
PLNGDVHLYAQAQTGCVKN

SEQ ID NO: 1150 - protein, 743 aa, synthetic construct
MAADGYLPDWLEDNLSEGIREWWALKPGAPQPKANQQHQDNARGLVLPGYKYLGPGNGLDKGEPVNAADAAALEHDKAYDQQLKAGDNPYLKYNHADAEFQERLKEDTSFGGNLGRAVFQAKKRLLEPLGLVEEAAKTAPGKKRPVEQSPQEPDSSAGIGKSGAQPAKKRLNFGQTGDTESVPDPQPIGEPPAAPSGVGSLTMASGGGAPVADNNEGADGVGSSSGNWHCDSQWLGDRVITTSTRTWALPTYNNHLYKQISNSTSGGSSNDNAYFGYSTPWGYFDFNRFHCHFSPRDWQRLINNNWGFRPKRLNFKLFNIQVKEVTDNNGVKTIANNLTSTVQVFTDSDYQLPYVLGSAHEGCLPPFPADVFMIPQYGYLTLNDGSQAVGRSSFYCLEYFPSQMLRTGNNFQFSYEFENVPFHSSYAHSQSLDRLMNPLIDQYLYYLSKTINGSGQNQQTLKFSVAGPSNMAVQGRNYIPGPSYRQQRVSTTVTQNNNSEFAWPGASSWALNGRNSLMNPGPAMASHKEGEDRFFPLSGSLIFGKQGTGRDNVDADKVMITNEEEIKTTNPVATESYGQVATNHQSDGTGQVTGWAQAQTGWVQNQGILPGMVWQDRDVYLQGPIWAKIPHTDGNFHPSPLMGGFGMKHPPPQILIKNTPVPADPPTAFNKDKLNSFITQYSTGQVSVEIEWELQKENSKRWNPEIQYTSNYYKSNNVEFAVNTEGVYSEPRPIGTRYLTRNL

SEQ ID NO: 1151 - protein, 19 aa, synthetic construct
PLNGDVHLYAQAQTGWVKN

SEQ ID NO: 1152 - DNA, 2232 bp, synthetic construct
  source 1..2232: mol_type = other DNA
atggctgccgatggttatcttccagattggctcgaggacaaccttagtgaaggaattcgcgagtggtgggctttgaaacctggagcccctcaacccaaggcaaatcaacaacatcaagacaacgctcgaggtcttgtgcttccgggttacaaataccttggacccggcaacggactcgacaagggggagccggtcaacgcagcagacgcggcggccctcgagcacgacaaggcctacgaccagcagctcaaggccggagacaacccgtacctcaagtacaaccacgccgacgccgagttccaggagcggctcaaagaagatacgtcttttgggggcaacctcgggcgagcagtcttccaggccaaaaagaggcttcttgaacctcttggtctggttgaggaagcggctaagacggctcctggaaagaagaggcctgtagagcagtctcctcaggaaccggactcctccgcgggtattggcaaatcgggtgcacagcccgctaaaaagagactcaatttcggtcagactggcgacacagagtcagtcccagaccctcaaccaatcggagaacctcccgcagccccctcaggtgtgggatctcttacaatggcttcaggtggtggcgcaccagtggcagacaataacgaaggtgccgatggagtgggtagttcctcgggaaattggcattgcgattcccaatggctgggggacagagtcatcaccaccagcacccgaacctgggccctgcccacctacaacaatcacctctacaagcaaatctccaacagcacatctggaggatcttcaaatgacaacgcctacttcggctacagcaccccctgggggtattttgacttcaacagattccactgccacttctcaccacgtgactggcagcgactcatcaacaacaactggggattccggcctaagcgactcaacttcaagctcttcaacattcaggtcaaagaggttacggacaacaatggagtcaagaccatcgccaataaccttaccagcacggtccaggtcttcacggactcagactatcagctcccgtacgtgctcgggtcggctcacgagggctgcctcccgccgttcccagcggacgttttcatgattcctcagtacgggtatctgacgcttaatgatggaagccaggccgtgggtcgttcgtccttttactgcctggaatatttcccgtcgcaaatgctaagaacgggtaacaacttccagttcagctacgagtttgagaacgtacctttccatagcagctacgctcacagccaaagcctggaccgactaatgaatccactcatcgaccaatacttgtactatctctcaaagactattaacggttctggacagaatcaacaaacgctaaaattcagtgtggccggacccagcaacatggctgtccagggaagaaactacatacctggacccagctaccgacaacaacgtgtctcaaccactgtgactcaaaacaacaacagcgaatttgcttggcctggagcttcttcttgggctctcaatggacgtaatagcttgatgaatcctggacctgctatggccagccacaaagaaggagaggaccgtttctttcctttgtctggatctttaatttttggcaaacaaggaactggaagagacaacgtggatgcggacaaagtcatgataaccaacgaagaagaaattaaaactactaacccggtagcaacggagtcctatggacaagtggccacaaaccaccagagtgacggaacaggacaagtcacaggatgggcacaggcgcagaccggctgggttcaaaaccaaggaatacttccgggtatggtttggcaggacagagatgtgtacctgcaaggacccatttgggccaaaattcctcacacggacggcaactttcacccttctccgctgatgggagggtttggaatgaagcacccgcctcctcagatcctcatcaaaaacacacctgtacctgccgatcctccaacggccttcaacaaggacaagctgaactctttcatcacccagtattctactggccaagtcagcgtggagatcgagtgggagctgcagaaggaaaacagcaagcggtggaacccggagatccagtacacttccaactattacaagtctaataatgttgaatttgctgttaatactgaaggtgtatatagtgaaccccgccccattggcaccagatacctgactcgtaatctgtaa

SEQ ID NO: 1153 - protein, 19 aa, synthetic construct
PLNGPVHLYAQAQTGWVKN

SEQ ID NO: 1154 - protein, 19 aa, synthetic construct
PLNGSVHLYAQAQTGCVKN

SEQ ID NO: 1155 - protein, 19 aa, synthetic construct
PINGAVHLYAQAQTGWVEN

SEQ ID NO: 1156 - protein, 19 aa, synthetic construct
PLNGAVHLNAQAQTGWVEN

SEQ ID NO: 1157 - protein, 19 aa, synthetic construct
PLNGAVHLYAQAQSGWVEN

SEQ ID NO: 1158 - protein, 19 aa, synthetic construct
PLNGAVHLYAQAQTAWVEN

SEQ ID NO: 1159 - protein, 19 aa, synthetic construct
PLNGAVHLYAQAQTGCVEN

SEQ ID NO: 1160 - protein, 19 aa, synthetic construct
PLNGAVHLYAQAQTGLVEN

SEQ ID NO: 1161 - protein, 19 aa, synthetic construct
PVNGAVHLYAQAQTGWVEN

SEQ ID NO: 1162 - protein, 19 aa, synthetic construct
SLNGAVHLYAQAQTGWVEN

SEQ ID NO: 1163 - protein, 19 aa, synthetic construct
TLNGAVHLYAQAQTGWVEN

SEQ ID NO: 1164 - protein, 19 aa, synthetic construct
PHNGAVHLYAQAQTGWVHN

SEQ ID NO: 1165 - protein, 19 aa, synthetic construct
PINGAVHLYAQAQTGWVHN

SEQ ID NO: 1166 - protein, 19 aa, synthetic construct
PLKGAVHLYAQAQTGWVHN

SEQ ID NO: 1167 - protein, 19 aa, synthetic construct
PLNGAAHLYAQAQTGWVHN

SEQ ID NO: 1168 - protein, 19 aa, synthetic construct
PLNGADHLYAQAQTGWVHN

SEQ ID NO: 1169 - protein, 19 aa, synthetic construct
PLNGAGHLYAQAQTGWVHN

SEQ ID NO: 1170 - protein, 19 aa, synthetic construct
PLNGALHLYAQAQTGWVHN

SEQ ID NO: 1171 - protein, 19 aa, synthetic construct
PLNGAVDLYAQAQTGWVHN

SEQ ID NO: 1172 - protein, 19 aa, synthetic construct
PLNGAVHHYAQAQTGWVHN

SEQ ID NO: 1173 - protein, 19 aa, synthetic construct
PLNGAVHIYAQAQTGWVHN

SEQ ID NO: 1174 - protein, 19 aa, synthetic construct
PLNSAVHLYAQAQTGWVKN

SEQ ID NO: 1175 - protein, 19 aa, synthetic construct
PLSGAVHLYAQAQTGWVKN

SEQ ID NO: 1176 - protein, 19 aa, synthetic construct
PPNGAVHLYAQAQTGWVKN

SEQ ID NO: 1177 - protein, 19 aa, synthetic construct
PRNGAVHLYAQAQTGWVKN

SEQ ID NO: 1178 - protein, 19 aa, synthetic construct
PVNGAVHLYAQAQTGWVKN

SEQ ID NO: 1179 - protein, 19 aa, synthetic construct
QLNGAVHIYAQAQTGWVKN

SEQ ID NO: 1180 - protein, 19 aa, synthetic construct
QLNGAVHLYAQAQTGCVKN

SEQ ID NO: 1181 - protein, 19 aa, synthetic construct
QLNGAVHLYAQAQTGLVKN

SEQ ID NO: 1182 - protein, 19 aa, synthetic construct
QLNGAVHLYDQAQTGWVKN

SEQ ID NO: 1183 - protein, 19 aa, synthetic construct
RLNGAVHLYAQAQTGWVKN

SEQ ID NO: 1184 - protein, 19 aa, synthetic construct
SINGAVHLYAQAQTGWVKN

SEQ ID NO: 1185 - protein, 19 aa, synthetic construct
SLNGAVHLYAQAQTGWVKN

SEQ ID NO: 1186 - protein, 19 aa, synthetic construct
SLNGAVNLYAQAQTGWVKN

SEQ ID NO: 1187 - protein, 19 aa, synthetic construct
TLNGAVHLYAQAQTGWVKN

SEQ ID NO: 1188 - protein, 19 aa, synthetic construct
TLNGAVNLYAQAQTGWVKN

SEQ ID NO: 1189 - protein, 19 aa, synthetic construct
PLNGAVHHYAQAQTGWVPN

SEQ ID NO: 1190 - protein, 19 aa, synthetic construct
PLNGAVHLNAQAQTGWVPN

SEQ ID NO: 1191 - protein, 19 aa, synthetic construct
PLNGAVHLSAQAQTGWVPN

SEQ ID NO: 1192 - protein, 19 aa, synthetic construct
PLNGAVHLYAQAQTGCVPN

SEQ ID NO: 1193 - protein, 19 aa, synthetic construct
PLNGAVNLYAQAQTGWVPN

SEQ ID NO: 1194 - protein, 12 aa, synthetic construct
AQAQAQTGWVQN

SEQ ID NO: 1195 - protein, 20 aa, synthetic construct
VATNHQSAQAQAQTGWVQNQ

SEQ ID NO: 1196 - protein, 12 aa, synthetic construct
TNHQSAQAQAQT

SEQ ID NO: 1197 - protein, 7 aa, synthetic construct
AQAQAQT

SEQ ID NO: 1198 - protein, 13 aa, synthetic construct
ATNHQSAQAQAQT

SEQ ID NO: 1199 - protein, 19 aa, synthetic construct
PLNGAVHLDAQAQTGWVHN

SEQ ID NO: 1200 - protein, 19 aa, synthetic construct
PLNGAVHLNAQAQTGWVHN

SEQ ID NO: 1201 - protein, 19 aa, synthetic construct
PLNGAVHLSAQAQTGWVHN

SEQ ID NO: 1202 - protein, 19 aa, synthetic construct
PLNGAVHLYAKAQTGWVHN

SEQ ID NO: 1203 - protein, 19 aa, synthetic construct
PLNGAVHLYAQAKTGWVHN

SEQ ID NO: 1204 - protein, 19 aa, synthetic construct
PLNGAVHLYAQAQAGWVHN

SEQ ID NO: 1205 - protein, 19 aa, synthetic construct
PLNGAVHLYAQAQRGWVHN

SEQ ID NO: 1206 - protein, 19 aa, synthetic construct
PLNGAVHLYAQAQSGWVHN

SEQ ID NO: 1207 - protein, 19 aa, synthetic construct
PLNGAVHLYAQAQTGCVHN

SEQ ID NO: 1208 - protein, 19 aa, synthetic construct
PLNGAVHLYAQAQTGLVHN

SEQ ID NO: 1209 - protein, 19 aa, synthetic construct
PLNGAVHLYAQAQVSAVHN

SEQ ID NO: 1210 - protein, 19 aa, synthetic construct
PLNGAVHLYAQEQTGWVHN

SEQ ID NO: 1211 - protein, 19 aa, synthetic construct
PLNGAVHLYAQGQTGWVHN

SEQ ID NO: 1212 - protein, 19 aa, synthetic construct
PLNGAVHLYDQAQTGWVHN

SEQ ID NO: 1213 - protein, 19 aa, synthetic construct
PLNGAVHLYGQAQTGWVHN

SEQ ID NO: 1214 - protein, 19 aa, synthetic construct
PLNGAVHLYSQAQTGWVHN

SEQ ID NO: 1215 - protein, 19 aa, synthetic construct
PLNGAVHRYAQAQTGWVHN

SEQ ID NO: 1216 - protein, 19 aa, synthetic construct
PLNGAVHVYAQAQTGWVHN

SEQ ID NO: 1217 - protein, 19 aa, synthetic construct
PLNGAVNLYAQAQTGWVHN

SEQ ID NO: 1218 - protein, 19 aa, synthetic construct
PLNGAVPLYAQAQTGWVHN

SEQ ID NO: 1219 - protein, 19 aa, synthetic construct
PLNGAVQLYAQAQTGWVHN

SEQ ID NO: 1220 - protein, 19 aa, synthetic construct
PLNGTVHLYAQAQTGWVHN

SEQ ID NO: 1221 - protein, 19 aa, synthetic construct
PRNGAVHLYAQAQTGWVHN

SEQ ID NO: 1222 - protein, 19 aa, synthetic construct
PVNGAVHLYAQAQTGWVHN

SEQ ID NO: 1223 - protein, 19 aa, synthetic construct
SLNGAVHLYAQAQTGWVHN

SEQ ID NO: 1224 - protein, 19 aa, synthetic construct
TLNGAVHLYAQAQTGWVHN

SEQ ID NO: 1225 - protein, 19 aa, synthetic construct
ALNGAVNLYAQAQTGWVKN

SEQ ID NO: 1226 - protein, 19 aa, synthetic construct
KLNGAVHLYAQAQTGWVKN

SEQ ID NO: 1227 - protein, 19 aa, synthetic construct
PHNGAVHLYAQAQTGWVKN

SEQ ID NO: 1228 - protein, 19 aa, synthetic construct
PINGAVHLYAQAQTGWVKN

SEQ ID NO: 1229 - protein, 19 aa, synthetic construct
PLKGAVHLYAQAQTGWVKN

SEQ ID NO: 1230 - protein, 19 aa, synthetic construct
PLNAAVHLYAQAQTGWVKN

SEQ ID NO: 1231 - protein, 19 aa, synthetic construct
PLNGAAHLYAQAQTGWVKN

SEQ ID NO: 1232 - protein, 19 aa, synthetic construct
PLNGADHLYAQAQTGWVKN

SEQ ID NO: 1233 - protein, 19 aa, synthetic construct
PLNGAGHLYAQAQTGWVKN

SEQ ID NO: 1234 - protein, 19 aa, synthetic construct
PLNGAVDLYAQAQTGWVKN

SEQ ID NO: 1235 - protein, 19 aa, synthetic construct
PLNGAVHHYAQAQTGWVKN

SEQ ID NO: 1236 - protein, 19 aa, synthetic construct
PLNGAVHIYAQAQTGWVKN

SEQ ID NO: 1237 - protein, 19 aa, synthetic construct
PLNGAVHLDAQAQTGWVKN

SEQ ID NO: 1238 - protein, 19 aa, synthetic construct
PLNGAVHLNAQAQTGWVKN

SEQ ID NO: 1239 - protein, 19 aa, synthetic construct
PLNGAVHLSAQAQTGWVKN

SEQ ID NO: 1240 - protein, 19 aa, synthetic construct
PLNGAVHLYAEAQTGWVKN

SEQ ID NO: 1241 - protein, 19 aa, synthetic construct
PLNGAVHLYAHAQTGWVKN

SEQ ID NO: 1242 - protein, 19 aa, synthetic construct
PLNGAVHLYALAQTGWVKN

SEQ ID NO: 1243 - protein, 19 aa, synthetic construct
PLNGAVHLYAPAQTGWVKN

SEQ ID NO: 1244 - protein, 19 aa, synthetic construct
PLNGAVHLYAQAETGWVKN

SEQ ID NO: 1245 - protein, 19 aa, synthetic construct
PLNGAVHLYAQAQKGWVKN

SEQ ID NO: 1246 - protein, 19 aa, synthetic construct
PLNGAVHLYAQAQPGWVKN

SEQ ID NO: 1247 - protein, 19 aa, synthetic construct
PLNGAVHLYAQAQSGWVKN

SEQ ID NO: 1248 - protein, 19 aa, synthetic construct
PLNGAVHLYAQAQSSLVKN

SEQ ID NO: 1249 - protein, 19 aa, synthetic construct
PLNGAVHLYAQAQSSSVKN

SEQ ID NO: 1250 - protein, 19 aa, synthetic construct
PLNGAVHLYAQAQTACVKN

SEQ ID NO: 1251 - protein, 19 aa, synthetic construct
PLNGAVHLYAQAQTEWVKN

SEQ ID NO: 1252 - protein, 19 aa, synthetic construct
PLNGAVHLYAQAQTGAVKN

SEQ ID NO: 1253 - protein, 19 aa, synthetic construct
PLNGAVHLYAQAQTGCVKN

SEQ ID NO: 1254 - protein, 19 aa, synthetic construct
PLNGAVHLYAQAQTGLVKN

SEQ ID NO: 1255 - protein, 19 aa, synthetic construct
PLNGAVHLYAQAQTSWVKN

SEQ ID NO: 1256 - protein, 19 aa, synthetic construct
PLNGAVHLYAQEQTGWVKN

SEQ ID NO: 1257 - protein, 19 aa, synthetic construct
PLNGAVHLYAQSQTGWVKN

SEQ ID NO: 1258 - protein, 19 aa, synthetic construct
PLNGAVHLYDQAQTGWVKN

SEQ ID NO: 1259 - protein, 19 aa, synthetic construct
PLNGAVHLYEQAQTGWVKN

SEQ ID NO: 1260 - protein, 19 aa, synthetic construct
PLNGAVHLYGQAQTGWVKN

SEQ ID NO: 1261 - protein, 19 aa, synthetic construct
PLNGAVHLYSQAQTGLVKN

SEQ ID NO: 1262 - protein, 7 aa, synthetic construct
TLAVPFK

SEQ ID NO: 1263 - protein, 19 aa, synthetic construct
PLNGAVHLYSQAQTGWVKN

SEQ ID NO: 1264 - protein, 19 aa, synthetic construct
PLNGAVHLYTQAQTGWVKN

SEQ ID NO: 1265 - protein, 19 aa, synthetic construct
PLNGAVHPYAQAQTGWVKN

SEQ ID NO: 1266 - protein, 19 aa, synthetic construct
PLNGAVHRSLQAQTGWVKN

SEQ ID NO: 1267 - protein, 19 aa, synthetic construct
PLNGAVHRYAQAQTGWVKN

SEQ ID NO: 1268 - protein, 19 aa, synthetic construct
PLNGAVHVYAQAQTGWVKN

SEQ ID NO: 1269 - protein, 19 aa, synthetic construct
PLNGAVLLYAQAQTGWVKN

SEQ ID NO: 1270 - protein, 19 aa, synthetic construct
PLNGAVNLYAQAQTGCVKN

SEQ ID NO: 1271 - protein, 19 aa, synthetic construct
PLNGAVNLYAQAQTGWVKN

SEQ ID NO: 1272 - protein, 19 aa, synthetic construct
PLNGAVNLYDQAQTGWVKN

SEQ ID NO: 1273 - protein, 6 aa, synthetic construct
ALPKQY

SEQ ID NO: 1274 - protein, 19 aa, synthetic construct
PLNGAVPLYAQAQTGWVKN

SEQ ID NO: 1275 - protein, 19 aa, synthetic construct
PLNGAVQLYAQAQTGWVKN

SEQ ID NO: 1276 - protein, 19 aa, synthetic construct
PLNGAVRSTAQAQTGWVKN

SEQ ID NO: 1277 - protein, 19 aa, synthetic construct
PLNGAVSLRAQAQTGWVKN

SEQ ID NO: 1278 - protein, 19 aa, synthetic construct
PLNGAVSSRAQAQTGWVKN

SEQ ID NO: 1279 - protein, 12 aa, synthetic construct
QSVLYSSKNKNY

SEQ ID NO: 1280 - protein, 11 aa, synthetic construct
QSLLHSNGYNY

SEQ ID NO: 1281 - protein, 12 aa, synthetic construct
QSVLYSSNNKNY

SEQ ID NO: 1282 - protein, 11 aa, synthetic construct
QSLLHSNGYIY

SEQ ID NO: 1283 - protein, 7 aa, synthetic construct
YKSDSDK

SEQ ID NO: 1284 - protein, 9 aa, synthetic construct
MQVTQFPRT

SEQ ID NO: 1285 - protein, 11 aa, synthetic construct
QSYDSSLSGSV

SEQ ID NO: 1286 - protein, 9 aa, synthetic construct
MQATQFPRT

SEQ ID NO: 1287 - protein, 9 aa, synthetic construct
QQRSNWPLT

SEQ ID NO: 1288 - protein, 9 aa, synthetic construct
QQRSNWPYT

SEQ ID NO: 1289 - protein, 9 aa, synthetic construct
MQATQFPLT

SEQ ID NO: 1290 - protein, 11 aa, synthetic construct
QVWDSSSDPVV

SEQ ID NO: 1291 - protein, 10 aa, synthetic construct
QSADSSGSYV

SEQ ID NO: 1292 - protein, 9 aa, synthetic construct
MQGTHWPLT

SEQ ID NO: 1293 - protein, 9 aa, synthetic construct
MIWHSSAWV

SEQ ID NO: 1294 - protein, 11 aa, synthetic construct
QSADSSGTYRV

SEQ ID NO: 1295 - protein, 10 aa, synthetic construct
QSTDSSGSWV

SEQ ID NO: 1296 - protein, 9 aa, synthetic construct
QQRRNWPYT

SEQ ID NO: 1297 - protein, 9 aa, synthetic construct
QQFNSYPFT

SEQ ID NO: 1298 - protein, 9 aa, synthetic construct
QQYYSSPYT

SEQ ID NO: 1299 - protein, 9 aa, synthetic construct
MQALQIPLT

SEQ ID NO: 1300 - protein, 9 aa, synthetic construct
QQYYSTPLT

SEQ ID NO: 1301 - protein, 9 aa, synthetic construct
MQTLQIPRT

SEQ ID NO: 1302 - protein, 25 aa, synthetic construct
EVQMVESGGGLVQPGGSLTLSCAAS

SEQ ID NO: 1303 - protein, 25 aa, synthetic construct [sequence omitted]

SEQ ID NO: 1304 - protein, 25 aa, synthetic construct
EVQLVESGGGLVQAGGSLRLSCAAS

SEQ ID NO: 1305 - protein, 25 aa, synthetic construct
QVQLQESGPGLVKPSETLSLTCTVS

SEQ ID NO: 1306 - protein, 25 aa, synthetic construct
EVQLLESGGGLVQPGGSLRLSCAAS

SEQ ID NO: 1307 - protein, 25 aa, synthetic construct
QITLKESGPTLVKPTQTLTLTCTLS

SEQ ID NO: 1308 - protein, 25 aa, synthetic construct
EVQLVESGGGLVKPGGSLRLSCAAS

SEQ ID NO: 1309 - protein, 25 aa, synthetic construct [sequence omitted]

SEQ ID NO: 1310 - protein, 25 aa, synthetic construct
QVTLKESGPVLVKPTETLTLTCTVS

SEQ ID NO: 1311 - protein, 17 aa, synthetic construct
MNWVRQAPGKGLEWVSY

SEQ ID NO: 1312 - protein, 17 aa, synthetic construct
MNWVRQAPGKGLEWISY

SEQ ID NO: 1313 - protein, 17 aa, synthetic construct
WTWIRQPAGKGLEWIGR

SEQ ID NO: 1314 - protein, 17 aa, synthetic construct
MSWVRRAPGKGLEWISI

SEQ ID NO: 1315 - protein, 17 aa, synthetic construct
VGWIRQPPGKALEWLAI

SEQ ID NO: 1316 - protein, 17 aa, synthetic construct
MNWVRQAPGKGLEWVSS

SEQ ID NO: 1317 - protein, 17 aa, synthetic construct
WSWIRQPAGKGLEWIGR

SEQ ID NO: 1318 - protein, 17 aa, synthetic construct
MSWVRQAPGKGLEWFGR

SEQ ID NO: 1319 - protein, 17 aa, synthetic construct
MHWVRQAAGKGLEWVST

SEQ ID NO: 1320 - protein, 17 aa, synthetic construct
MHWVRQAPGQGLEWMGW

SEQ ID NO: 1321 - protein, 17 aa, synthetic construct
VSWIRQPPGKALEWLAH

SEQ ID NO: 1322 - protein, 38 aa, synthetic construct
YYADSVKGRFTISRDNAKNSLYLQMNSLRDEDTAVYYC

SEQ ID NO: 1323 - protein, 38 aa, synthetic construct
YYADSVEGRFTISRDNAYNSLYLQMISLRDDDTAVYYC

SEQ ID NO: 1324 - protein, 38 aa, synthetic construct
YYADSVKGRFTISRDNAKNSLSLQMNSLRDEDTAVYYC

SEQ ID NO: 1325 - protein, 38 aa, synthetic construct
YYADSVKGRFTISRDNAKNSLHLQMNSLRDEDTAVYYC

SEQ ID NO: 1326 - protein, 38 aa, synthetic construct
YYADSVKGRFTISRDNAKKSLYLQMNSLRDEDTAVYYC

SEQ ID NO: 1327 - protein, 38 aa, synthetic construct
NYNPSLKSRVTMSVDTSKNQFSLTLSSVTAADTAVYYC

SEQ ID NO: 1328 - protein, 38 aa, synthetic construct
YYADSMKGRFTISRDNSKNTLFLQMNSLRAEDTAVYYC

SEQ ID NO: 1329 - protein, 38 aa, synthetic construct
RYSPSLKNRLTFTKDTSKNQVVLTMTNMDPVDTATYYC

SEQ ID NO: 1330 - protein, 38 aa, synthetic construct
YYADSVKGRFTISRDNAKNSLYLQMNSLRAEDTAVYYC

SEQ ID NO: 1331 - protein, 38 aa, synthetic construct
YYNPSLQSRVTMSVDTSKNQFSLKLSAVTAADTAVYYC

SEQ ID NO: 1332 - protein, 38 aa, synthetic construct
YYADSVKGRFTVSRDNAKNSLYLQMNSLRDEDTAVYYC

SEQ ID NO: 1333 - protein, 38 aa, synthetic construct
NYNPSLKSRVTMSIDTSKKQFSLKLSSVTAADTAVYYC

SEQ ID NO: 1334 - protein, 38 aa, synthetic construct
KYADSVKGRFTISRDNAKNSLYLQMNSLRDEDTAVYYC

SEQ ID NO: 1335 - protein, 38 aa, synthetic construct
DYAAPVKGRFTISRDDSKNTLYLQMNSLKTEDTAVYYC

SEQ ID NO: 1336 - protein, 38 aa, synthetic construct
YYPGSVKGRFIISRENAKNSLYLQMNSLRAGDTAVYYC

SEQ ID NO: 1337 - protein, 38 aa, synthetic construct
NYAQKFQGRVTMTRDTSISTAYMELSRLRSDDTAVYYC

SEQ ID NO: 1338 - protein, 38 aa, synthetic construct
SYSTSLKSRLTISKDTSKSQVVLIMTNMDPVDTATYYC

SEQ ID NO: 1339 - protein, 11 aa, synthetic construct
WGQGTLVTVSS

SEQ ID NO: 1340 - protein, 11 aa, synthetic construct
WGQGILVTVSS

SEQ ID NO: 1341 - protein, 11 aa, synthetic construct
WGQGTTVTVSS

SEQ ID NO: 1342 - protein, 11 aa, synthetic construct
WGQGTLVIASS

SEQ ID NO: 1343 - protein, 11 aa, synthetic construct
WGQGTLVIVSS

SEQ ID NO: 1344 - protein, 11 aa, synthetic construct
WGQGTMVTVSS

SEQ ID NO: 1345 - protein, 26 aa, synthetic construct
DIVMTQTPLSSPVTLGQPASISCRSS

SEQ ID NO: 1346 - protein, 25 aa, synthetic construct
QSVLTQPPSVSGAPGQRVTISCTGS

SEQ ID NO: 1347 - protein, 26 aa, synthetic construct [sequence omitted]

SEQ ID NO: 1348 - protein, 26 aa, synthetic construct
EIVLTQSPATLSSSPGERATLSCRAS

SEQ ID NO: 1349 - protein, 26 aa, synthetic construct
DIVMTQTPLSSLVTLGQPASISCRSS

SEQ ID NO: 1350 - protein, 25 aa, synthetic construct
SYVLTQPPSVSVAPGQTARITCGGN

SEQ ID NO: 1351 - protein, 25 aa, synthetic construct
SYELTQPPSVSVSPGQTARITCSGD

SEQ ID NO: 1352 - protein, 26 aa, synthetic construct
DVVMTQSPLSLPVTLGQPASISCRSS

SEQ ID NO: 1353 - protein, 25 aa, synthetic construct
QAVLTQPSSLSASPGASARLTCTLR

SEQ ID NO: 1354 - protein, 25 aa, synthetic construct
SYELTQPPSVSVSPGQTARITCSGE

SEQ ID NO: 1355 - protein, 26 aa, synthetic construct
DVVMTQTPLSSPVTLGQPASISCRSS

SEQ ID NO: 1356 - protein, 26 aa, synthetic construct
DIQLTQSPSFLSASVGDRVTITCRAS

SEQ ID NO: 1357 - protein, 26 aa, synthetic construct
DIVMTQSPDSLAVSLGERATINCKSS

SEQ ID NO: 1358 - protein, 26 aa, synthetic construct
DILMTQSPLSLPVTPGEPASISCRSS

SEQ ID NO: 1359 - protein, 26 aa, synthetic construct
DIVMTQSPLSLPVIPGEPASISCRSS

SEQ ID NO: 1360 - protein, 17 aa, synthetic construct
LSWLQQRPGQPPRLLIY

SEQ ID NO: 1361 - protein, 17 aa, synthetic construct
VHWYQQLPGTAPKLLIY

SEQ ID NO: 1362 - protein, 17 aa, synthetic construct
LAWYQQKPGQAPRLFIY

SEQ ID NO: 1363 - protein, 17 aa, synthetic construct
LNWYQQKPGQAPRLLIY

SEQ ID NO: 1364 - protein, 17 aa, synthetic construct
VHWYQQKPGQAPVLVVY

SEQ ID NO: 1365 - protein, 17 aa, synthetic construct
AYWYQQKPGQAPVLVIF

SEQ ID NO: 1366 - protein, 17 aa, synthetic construct
LNWFQQRPGQSPRRLIY

SEQ ID NO: 1367 - protein, 17 aa, synthetic construct
LYWYQQKPGSPPQYLLR

SEQ ID NO: 1368 - protein, 17 aa, synthetic construct
AYWYQQKPGQAPVLVIY

SEQ ID NO: 1369 - protein, 17 aa, synthetic construct
ACWYQQKPGQAPVLVIY

SEQ ID NO: 1370 - protein, 17 aa, synthetic construct
LAWYLQKPGQAPRLLIY

SEQ ID NO: 1371 - protein, 17 aa, synthetic construct
LAWYQQKPGKAPKLLIY

SEQ ID NO: 1372 - protein, 17 aa, synthetic construct
LAWYQQKPGQPPKLLIY

SEQ ID NO: 1373 - protein, 17 aa, synthetic construct
LDWYLQKPGQSPQLLIY

SEQ ID NO: 1374 - protein, 36 aa, synthetic construct
NRFSGVPDRFSGSGAGTDFTLKITRVEAEDVGIYYC

SEQ ID NO: 1375 - protein, 36 aa, synthetic construct
NRPSGVPDRFSGSKSGTSASLAITGLQAEDETDFYC

SEQ ID NO: 1376 - protein, 36 aa, synthetic construct
NRFSGVPDRFSGSGAGTDFTLKISRVEAEDVGVYYC

SEQ ID NO: 1377 - protein, 36 aa, synthetic construct
KRATGIPARFSGSGSGTDFTLTISSLEPEDFAVYYC

SEQ ID NO: 1378 - protein, 36 aa, synthetic construct
NRATGIPARFSGSGSGTDFTLTISSLEPEDFALYYC

SEQ ID NO: 1379 - protein, 36 aa, synthetic construct
KRFSGVPDRFSGSGAGTDFTLKISRVEAEDVGVYYC

SEQ ID NO: 1380 - protein, 36 aa, synthetic construct
KRFFGVPDRFSGSGAGTDFTLKINRVEAEDVGIYYC

SEQ ID NO: 1381 - protein, 36 aa, synthetic construct
DRPSGIPERFSGSNSGNTATLTISRVEAGDEADYYC

SEQ ID NO: 1382 - protein, 36 aa, synthetic construct
ERPSGIPERFSGSSSGTTVTLTISGVQAEDEADYYC

SEQ ID NO: 1383 - protein, 36 aa, synthetic construct
NRDSGVPDRFSGSGSGTDFTLKISRVEAEDVGVYYC

SEQ ID NO: 1384 - protein, 38 aa, synthetic construct
QQGSGVPSRFSGSKDASANAGILLISGLQSEDEADYYC

SEQ ID NO: 1385 - protein, 36 aa, synthetic construct
ERPSGIPERFSGSSSGTTVTLTITGVQAEDEADYYC

SEQ ID NO: 1386 - protein, 36 aa, synthetic construct
NRATGIPARFSGSGSGTDFTLTISRLEPEDFAVYYC

SEQ ID NO: 1387 - protein, 36 aa, synthetic construct
TLQSGVPSRFSGSGSGTEFTLTISSLQPEDFATYYC

SEQ ID NO: 1388 - protein, 36 aa, synthetic construct
TRESGVPDRFSGSGSGTDFTLAISSLQAEDVAVYYC

SEQ ID NO: 1389 - protein, 36 aa, synthetic construct
NRASGVPDRFSGSGSGTDFTLKFSRVEAEDVGLYYC

SEQ ID NO: 1390 - protein, 36 aa, synthetic construct
TRESGVPDRFSGSGSGTDFTLTISSLQAEDVAVYYC

SEQ ID NO: 1391 - protein, 36 aa, synthetic construct
NRASGVPDRFSGSGSGTDFKLKISRVEAEDVGVYYC

SEQ ID NO: 1392 - protein, 10 aa, synthetic construct
FGQGTKVEIR

SEQ ID NO: 1393 - protein, 10 aa, synthetic construct
FGGGTKLTVL

SEQ ID NO: 1394 - protein, 10 aa, synthetic construct
FGQGSKLEIK

SEQ ID NO: 1395 - protein, 10 aa, synthetic construct
FGGGTKVEIK

SEQ ID NO: 1396 - protein, 10 aa, synthetic construct
FGQGTKLEIK

SEQ ID NO: 1397 - protein, 10 aa, synthetic construct
FGQGTRLEIK

SEQ ID NO: 1398 - protein, 10 aa, synthetic construct
FGGGTMLTVL

SEQ ID NO: 1399 - protein, 10 aa, synthetic construct
FGTGTKVTVL

SEQ ID NO: 1400 - protein, 10 aa, synthetic construct
FGPGTKVDIK

SEQ ID NO: 1401 - protein, 329 aa, synthetic construct
ASTKGPSVFPLAPSSKSTSGGTAALGCLVKDYFPEPVTVSWNSGALTSGVHTFPAVLQSSGLYSLSSVVTVPSSSLGTQTYICNVNHKPSNTKVDKKVEPKSCDKTHTCPPCPAPELLGGPSVFLFPPKPKDTLMISRTPEVTCVVVDVSHEDPEVKFNWYVDGVEVHNAKTKPREEQYNSTYRVVSVLTVLHQDWLNGKEYKCKVSNKALPAPIEKTISKAKGQPREPQVYTLPPSREEMTKNQVSLTCLVKGFYPSDIAVEWESNGQPENNYKTTPPVLDSDGSFFLYSKLTVDKSRWQQGNVFSCSVMHEALHNHYTQKSLSLSPG

SEQ ID NO: 1402 - protein, 106 aa, synthetic construct
GQPKAAPSVTLFPPSSEELQANKATLVCLISDFYPGAVTVAWKADSSPVKAGVETTTPSKQSNNKYAASSYLSLTPEQWKSHRSYSCQVTHEGSTVEKTVAPTECS

SEQ ID NO: 1403 - protein, 107 aa, synthetic construct [sequence omitted]

SEQ ID NO: 1404 - protein, 441 aa, Homo sapiens
MAEPRQEFEVMEDHAGTYGLGDRKDQGGYTMHQDQEGDTDAGLKESPLQTPTEDGSEEPGSETSDAKSTPTAEDVTAPLVDEGAPGKQAAAQPHTEIPEGTTAEEAGIGDTPSLEDEAAGHVTQARMVSKSKDGTGSDDKKAKGADGKTKIATPRGAAPPGQKGQANATRIPAKTPPAPKTPPSSGEPPKSGDRSGYSSPGSPGTPGSRSRTPSLPTPPTREPKKVAVVRTPPKSPSSAKSRLQTAPVPMPDLKNVKSKIGSTENLKHQPGGGKVQIINKKLDLSNVQSKCGSKDNIKHVPGGGSVQIVYKPVDLSKVTSKCGSLGNIHHKPGGGQVEVKSEKLDFKDRVQSKIGSLDNITHVPGGGNKKIETHKLTFRENAKAKTDHGAEIVYKSPVVSGDTSPRHLSNVSSTGSIDMVDSPQLATLADEVSASLAKQGL

SEQ ID NO: 1405 - protein, 20 aa, synthetic construct
  SITE 8: note = phosphorylated residue
  SITE 13: note = phosphorylated residue
TPGSRSRTPSLPTPPTREPK

SEQ ID NO: 1406 - protein, 19 aa, synthetic construct
  SITE 9: note = phosphorylated residue
  SITE 11: note = phosphorylated residue
  SITE 14: note = phosphorylated residue
GTPGSRSRTPSLPTPPTRE

SEQ ID NO: 1407 - protein, 37 aa, synthetic construct
  SITE 18: note = phosphorylated residue
  SITE 26: note = phosphorylated residue
  SITE 31: note = phosphorylated residue
RENAKAKTDHGAEIVYKSPVVSGDTSPRHLSNVSSTG

SEQ ID NO: 1408 - protein, 8 aa, Homo sapiens
PTREPKKV

SEQ ID NO: 1409 - protein, 7 aa, Homo sapiens
ARMVSKS

SEQ ID NO: 1410 - protein, 24 aa, Homo sapiens
SPSSAKSRLQTAPVPMPDLKNVKS

SEQ ID NO: 1411 - protein, 29 aa, synthetic construct
  SITE 18: note = phosphorylated residue
DHGAEIVYKSPVVSGDTSPRHLSNVSSTG

SEQ ID NO: 1412 - protein, 16 aa, synthetic construct
  SITE 4: note = phosphorylated residue
  SITE 9: note = phosphorylated residue
CSRTPSLPTPPTREPK

SEQ ID NO: 1413 - protein, 18 aa, synthetic construct
  SITE 3: note = phosphorylated residue
  SITE 6: note = phosphorylated residue
  SITE 7: note = phosphorylated residue
  SITE 10: note = phosphorylated residue
  SITE 13: note = phosphorylated residue
  SITE 16: note = phosphorylated residue
  SITE 18: note = phosphorylated residue
DRSGYSSPGSPGTPGSRS

SEQ ID NO: 1414 - protein, 24 aa, synthetic construct
  SITE 9: note = phosphorylated residue
SGDRSGYSSPGSPGTPGSRSRTPS

SEQ ID NO: 1415 - protein, 24 aa, synthetic construct
  SITE 12: note = phosphorylated residue
SGDRSGYSSPGSPGTPGSRSRTPS

SEQ ID NO: 1416 - protein, 24 aa, synthetic construct
  SITE 15: note = phosphorylated residue
SGDRSGYSSPGSPGTPGSRSRTPS

SEQ ID NO: 1417 - protein, 24 aa, synthetic construct
  SITE 9: note = phosphorylated residue
  SITE 12: note = phosphorylated residue
  SITE 15: note = phosphorylated residue
SGDRSGYSSPGSPGTPGSRSRTPS

SEQ ID NO: 1418 - protein, 24 aa, synthetic construct
  SITE 9: note = phosphorylated residue
  SITE 12: note = phosphorylated residue
SGDRSGYSSPGSPGTPGSRSRTPS

SEQ ID NO: 1419 - protein, 24 aa, synthetic construct
  SITE 12: note = phosphorylated residue
  SITE 15: note = phosphorylated residue
SGDRSGYSSPGSPGTPGSRSRTPS

SEQ ID NO: 1420 - protein, 24 aa, synthetic construct
  SITE 9: note = phosphorylated residue
  SITE 15: note = phosphorylated residue
SGDRSGYSSPGSPGTPGSRSRTPS

SEQ ID NO: 1421 - protein, 19 aa, synthetic construct
  SITE 9: note = phosphorylated residue
GTPGSRSRTPSLPTPPTRE

SEQ ID NO: 1422 - protein, 19 aa, synthetic construct
  SITE 11: note = phosphorylated residue
GTPGSRSRTPSLPTPPTRE

SEQ ID NO: 1423 - protein, 19 aa, synthetic construct
  SITE 14: note = phosphorylated residue
GTPGSRSRTPSLPTPPTRE

SEQ ID NO: 1424 - protein, 19 aa, synthetic construct
  SITE 9: note = phosphorylated residue
  SITE 11: note = phosphorylated residue
GTPGSRSRTPSLPTPPTRE

SEQ ID NO: 1425 - protein, 19 aa, synthetic construct
  SITE 9: note = phosphorylated residue
  SITE 14: note = phosphorylated residue
GTPGSRSRTPSLPTPPTRE

SEQ ID NO: 1426 - protein, 19 aa, synthetic construct
  SITE 11: note = phosphorylated residue
  SITE 14: note = phosphorylated residue
GTPGSRSRTPSLPTPPTRE

SEQ ID NO: 1427 - protein, 19 aa, synthetic construct
  SITE 9: note = phosphorylated residue
  SITE 11: note = phosphorylated residue
  SITE 14: note = phosphorylated residue
GTPGSRSRTPSLPTPPTRE

SEQ ID NO: 1428 - protein, 18 aa, synthetic construct
  SITE 1: note = phosphorylated residue
  SITE 4: note = phosphorylated residue
  SITE 15: note = phosphorylated residue
TPPTREPKKVAVVRTPPK

SEQ ID NO: 1429 - protein, 16 aa, synthetic construct
  SITE 7: note = phosphorylated residue
KVAVVRTPPKSPSSAK

SEQ ID NO: 1430 - protein, 18 aa, synthetic construct
  SITE 11: note = phosphorylated residue
KVAVVRTPPKSPSSAKPS

SEQ ID NO: 1431 - protein, 18 aa, synthetic construct
  SITE 7: note = phosphorylated residue
  SITE 11: note = phosphorylated residue
KVAVVRTPPKSPSSAKPS

SEQ ID NO: 1432 - protein, 329 aa, synthetic construct
ASTKGPSVFPLAPSSKSTSGGTAALGCLVKDYFPEPVTVSWNSGALTSGVHTFPAVLQSSGLYSLSSVVTVPSSSLGTQTYICNVNHKPSNTKVDKRVEPKSCDKTHTCPPCPAPELLGGPSVFLFPPKPKDTLMISRTPEVTCVVVDVSHEDPEVKFNWYVDGVEVHNAKTKPREEQYNSTYRVVSVLTVLHQDWLNGKEYKCKVSNKALPAPIEKTISKAKGQPREPQVYTLPPSREEMTKNQVSLTCLVKGFYPSDIAVEWESNGQPENNYKTTPPVLDSDGSFFLYSKLTVDKSRWQQGNVFSCSVMHEALHNHYTQKSLSLSPG

SEQ ID NO: 1433 - protein, 326 aa, synthetic construct
ASTKGPSVFPLAPCSRSTSESTAALGCLVKDYFPEPVTVSWNSGALTSGVHTFPAVLQSSGLYSLSSVVTVPSSNFGTQTYTCNVDHKPSNTKVDKTVERKCCVECPPCPAPPVAGPSVFLFPPKPKDTLMISRTPEVTCVVVDVSHEDPEVQFNWYVDGVEVHNAKTKPREEQFNSTFRVVSVLTVVHQDWLNGKEYKCKVSNKGLPAPIEKTISKTKGQPREPQVYTLPPSREEMTKNQVSLTCLVKGFYPSDISVEWESNGQPENNYKTTPPMLDSDGSFFLYSKLTVDKSRWQQGNVFSCSVMHEALHNHYTQKSLSLSPGK

SEQ ID NO: 1434 - protein, 377 aa, synthetic construct
ASTKGPSVFPLAPCSRSTSGGTAALGCLVKDYFPEPVTVSWNSGALTSGVHTFPAVLQSSGLYSLSSVVTVPSSSLGTQTYTCNVNHKPSNTKVDKRVELKTPLGDTTHTCPRCPEPKSCDTPPPCPRCPEPKSCDTPPPCPRCPEPKSCDTPPPCPRCPAPELLGGPSVFLFPPKPKDTLMISRTPEVTCVVVDVSHEDPEVQFKWYVDGVEVHNAKTKPREEQYNSTFRVVSVLTVLHQDWLNGKEYKCKVSNKALPAPIEKTISKTKGQPREPQVYTLPPSREEMTKNQVSLTCLVKGFYPSDIAVEWESSGQPENNYNTTPPMLDSDGSFFLYSKLTVDKSRWQQGNIFSCSVMHEALHNRFTQKSLSLSPGK

SEQ ID NO: 1435 - protein, 327 aa, synthetic construct
ASTKGPSVFPLAPCSRSTSESTAALGCLVKDYFPEPVTVSWNSGALTSGVHTFPAVLQSSGLYSLSSVVTVPSSSLGTKTYTCNVDHKPSNTKVDKRVESKYGPPCPSCPAPEFLGGPSVFLFPPKPKDTLMISRTPEVTCVVVDVSQEDPEVQFNWYVDGVEVHNAKTKPREEQFNSTYRVVSVLTVLHQDWLNGKEYKCKVSNKGLPSSIEKTISKAKGQPREPQVYTLPPSQEEMTKNQVSLTCLVKGFYPSDIAVEWESNGQPENNYKTTPPVLDSDGSFFLYSRLTVDKSRWQEGNVFSCSVMHEALHNHYTQKSLSLSLGK

SEQ ID NO: 1436 - protein, 106 aa, synthetic construct
GQPKANPTVTLFPPSSEELQANKATLVCLISDFYPGAVTVAWKADGSPVKAGVETTKPSKQSNNKYAASSYLSLTPEQWKSHRSYSCQVTHEGSTVEKTVAPTECS

SEQ ID NO: 1437 - protein, 106 aa, synthetic construct
GQPKAAPSVTLFPPSSEELQANKATLVCLISDFYPGAVTVAWKADSSPVKAGVETTTPSKQSNNKYAASSYLSLTPEQWKSHKSYSCQVTHEGSTVEKTVAPTECS

SEQ ID NO: 1438 - protein, 106 aa, synthetic construct
GQPKAAPSVTLFPPSSEELQANKATLVCLISDFYPGAVKVAWKADGSPVNTGVETTTPSKQSNNKYAASSYLSLTPEQWKSHRSYSCQVTHEGSTVEKTVAPAECS

SEQ ID NO: 1439 - protein, 106 aa, synthetic construct
GQPKAAPSVTLFPPSSEELQANKATLVCLVSDFNPGAVTVAWKADGSPVKVGVETTKPSKQSNNKYAASSYLSLTPEQWKSHRSYSCRVTHEGSTVEKTVAPAECS

SEQ ID NO: 1440 - protein, 324 aa, synthetic construct
AKTTPPSVYPLAPGSAAQTNSMVTLGCLVKGYFPEPVTVTWNSGSLSSGVHTFPAVLQSDLYTLSSSVTVPSSPRPSETVTCNVAHPASSTKVDKKIVPRDCGCKPCICTVPEVSSVFIFPPKPKDVLTITLTPKVTCVVVDISKDDPEVQFSWFVDDVEVHTAQTQPREEQFNSTFRSVSELPIMHQDWLNGKEFKCRVNSAAFPAPIEKTISKTKGRPKAPQVYTIPPPKEQMAKDKVSLTCMITDFFPEDITVEWQWNGQPAENYKNTQPIMNTNGSYFVYSKLNVQKSNWEAGNTFTCSVLHEGLHNHHTEKSLSHSPGK

SEQ ID NO: 1441 - protein, 393 aa, synthetic construct
AKTTPPSVYPLAPGSAAQTNSMVTLGCLVKGYFPEPVTVTWNSGSLSSGVHTFPAVLQSDLYTLSSSVTVPSSPRPSETVTCNVAHPASSTKVDKKIVPRDCGCKPCICTVPEVSSVFIFPPKPKDVLTITLTPKVTCVVVDISKDDPEVQFSWFVDDVEVHTAQTQPREEQFNSTFRSVSELPIMHQDWLNGKEFKCRVNSAAFPAPIEKTISKTKGRPKAPQVYTIPPPKEQMAKDKVSLTCMITDFFPEDITVEWQWNGQPAENYKNTQPIMNTNGSYFVYSKLNVQKSNWEAGNTFTCSVLHEGLHNHHTEKSLSHSPGLQLDETCAEAQDGELDGLWTTITIFISLFLLSVCYSAAVTLFKVKWIFSSVVELKQTLVPEYKNMIGQAP

SEQ ID NO: 1442 - protein, 330 aa, synthetic construct
AKTTAPSVYPLAPVCGDTTGSSVTLGCLVKGYFPEPVTLTWNSGSLSSGVHTFPAVLQSDLYTLSSSVTVTSSTWPSQSITCNVAHPASSTKVDKKIEPRGPTIKPCPPCKCPAPNLLGGPSVFIFPPKIKDVLMISLSPIVTCVVVDVSEDDPDVQISWFVNNVEVHTAQTQTHREDYNSTLRVVSALPIQHQDWMSGKEFKCKVNNKDLPAPIERTISKPKGSVRAPQVYVLPPPEEEMTKKQVTLTCMVTDFMPEDIYVEWTNNGKTELNYKNTEPVLDSDGSYFMYSKLRVEKKNWVERNSYSCSVVHEGLHNHHTTKSFSRTPGK

SEQ ID NO: 1443 - protein, 335 aa, synthetic construct
AKTTAPSVYPLVPVCGGTTGSSVTLGCLVKGYFPEPVTLTWNSGSLSSGVHTFPALLQSGLYTLSSSVTVTSNTWPSQTITCNVAHPASSTKVDKKIEPRVPITQNPCPPHQRVPPCAAPDLLGGPSVFIFPPKIKDVLMISLSPMVTCVVVDVSEDDPDVQISWFVNNVEVHTAQTQTHREDYNSTLRVVSALPIQHQDWMSGKEFKCKVNNRALPSPIEKTISKPRGPVRAPQVYVLPPPAEEMTKKEFSLTCMITGFLPAEIAVDWTSNGRTEQNYKNTATVLDSDGSYFMYSKLRVQKSTWERGSLFACSVVHEVLHNHLTTKTISRSLGK

SEQ ID NO: 1444 - protein, 404 aa, synthetic construct
KTTPPSVYPLAPGCGDTTGSSVTLGCLVKGYFPESVTVTWNSGSLSSSVHTFPALLQSGLYTMSSSVTVPSSTWPSQTVTCSVAHPASSTTVDKKLEPSGPISTINPCPPCKECHKCPAPNLEGGPSVFIFPPNIKDVLMISLTPKVTCVVVDVSEDDPDVQISWFVNNVEVHTAQTQTHREDYNSTIRVVSTLPIQHQDWMSGKEFKCKVNNKDLPSPIERTISKIKGLVRAPQVYILPPPAEQLSRKDVSLTCLVVGFNPGDISVEWTSNGHTEENYKDTAPVLDSDGSYFIYSKLNMKTSKWEKTDSFSCNVRHEGLKNYYLKKTISRSPGLDLDDICAEAKDGELDGLWTTITIFISLFLLSVCYSASVTLFKVKWIFSSVVELKQKISPDYRNMIGQGA

SEQ ID NO: 1445 - protein, 403 aa, synthetic construct
KTTAPSVYPLAPVCGGTTGSSVTLGCLVKGYFPEPVTLTWNSGSLSSGVHTFPALLQSGLYTLSSSVTVTSNTWPSQTITCNVAHPASSTKVDKKIEPRVPITQNPCPPLKECPPCAAPDLLGGPSVFIFPPKIKDVLMISLSPMVTCVVVDVSEDDPDVQISWFVNNVEVHTAQTQTHREDYNSTLRVVSALPIQHQDWMSGKEFKCKVNNRALPSPIEKTISKPRGPVRAPQVYVLPPPAEEMTKKEFSLTCMITGFLPAEIAVDWTSNGRTEQNYKNTATVLDSDGSYFMYSKLRVQKSTWERGSLFACSVVHEGLHNHLTTKTISRSLGLDLDDVCTEAQDGELDGLWTTITIFISLFLLSVCYSASVTLFKVKWIFSSVVELKQKISPDYRNMIGQGA

SEQ ID NO: 1446 - protein, 398 aa, synthetic construct
TTTAPSVYPLVPGCSDTSGSSVTLGCLVKGYFPEPVTVKWNYGALSSGVRTVSSVLQSGFYSLSSLVTVPSSTWPSQTVICNVAHPASKTELIKRIEPRIPKPSTPPGSSCPPGNILGGPSVFIFPPKPKDALMISLTPKVTCVVVDVSEDDPDVHVSWFVDNKEVHTAWTQPREAQYNSTFRVVSALPIQHQDWMRGKEFKCKVNNKALPAPIERTISKPKGRAQTPQVYTIPPPREQMSKKKVSLTCLVTNFFSEAISVEWERNGELEQDYKNTPPILDSDGTYFLYSKLTVDTDSWLQGEIFTCSVVHEALHNHHTQKNLSRSPELELNETCAEAQDGELDGLWTTITIFISLFLLSVCYSASVTLFKVKWIFSSVVQVKQTAIPDYRNMIGQGA

SEQ ID NO: 1447 - protein, 106 aa, synthetic construct
ADAAPTVSIFPPSSEQLTSGGASVVCFLNNFYPKDINVKWKIDGSERQNGVLNSWTDQDSKDSTYSMSSTLTLTKDEYERHNSYTCEATHKTSTSPIVKSFNRNEC

SEQ ID NO: 1448 - protein, 105 aa, synthetic construct
QPKSSPSVTLFPPSSEELETNKATLVCTITDFYPGVVTVDWKVDGTPVTQGMETTQPSKQSNNKYMASSYLTLTARAWERHSSYSCQVTHEGHTVEKSLSRADCS

SEQ ID NO: 1449 - protein, 104 aa, synthetic construct
QPKSTPTLTVFPPSSEELKENKATLVCLISNFSPSGVTVAWKANGTPITQGVDTSNPTKEGNKFMASSFLHLTSDQWRSHNSFTCQVTHEGDTVEKSLSPAECL

SEQ ID NO: 1450 - protein, 104 aa, synthetic construct
QPKSTPTLTMFPPSPEELQENKATLVCLISNFSPSGVTVAWKANGTPITQGVDTSNPTKEDNKYMASSFLHLTSDQWRSHNSFTCQVTHEGDTVEKSLSPAECL

SEQ ID NO: 1451 - DNA, 84 bp, synthetic construct
  source 1..84: mol_type = other DNA
atggcgacgggttcaagaacttccctacttcttgcatttggcctgctttgtttgccgtggttacaggagggctcggcagctgcc

SEQ ID NO: 1452 - DNA, 93 bp, synthetic construct
  source 1..93: mol_type = other DNA
gccgccaccatggcgacgggttcaagaacttccctacttcttgcatttggcctgctttgtttgccgtggttacaggagggctcggcagctgcc

SEQ ID NO: 1453 - DNA, 96 bp, synthetic construct
  source 1..96: mol_type = other DNA
gccgccaccatgggggtgcacgaatgtcctgcctggctgtggcttctcctgtccctgctgtcgctccctctgggcctcccagtcctgggcgctgcc

SEQ ID NO: 1454 - DNA, 66 bp, synthetic construct
  source 1..66: mol_type = other DNA
gccgccaccatgggagtcaaagttctgtttgccctgatctgcatcgctgtggccgaggccgctgcc

SEQ ID NO: 1455 - DNA, 15 bp, synthetic construct
  source 1..15: mol_type = other DNA
ggaggaggaggaagt

SEQ ID NO: 1456 - DNA, 72 bp, synthetic construct
  source 1..72: mol_type = other DNA
gccgccaccatgaaacacctgtggttcttcctcctgctggtggcagctcccagatgggtcctgtccgctgcc

SEQ ID NO: 1457 - DNA, 15 bp, synthetic construct
  source 1..15: mol_type = other DNA
ggaggtggaggttct

SEQ ID NO: 1458 - DNA, 93 bp, synthetic construct
  source 1..93: mol_type = other DNA
gccgccaccatggacctcctgcacaagaacatgaaacacctgtggttcttcctcctcctggtggcagctcccagatgggtgctgtccgctgcc

SEQ ID NO: 1459 - DNA, 69 bp, synthetic construct
  source 1..69: mol_type = other DNA
gccgccaccatggctttcctctggctcctctcctgctgggccctcctgggtaccaccttcggcgctgcc

SEQ ID NO: 1460 - DNA, 81 bp, synthetic construct
  source 1..81: mol_type = other DNA
gccgccaccatgccccccaagaagtgcctgctgctgctgctgaccctgctgctgctgatctccaccaccttcggcgctgcc

SEQ ID NO: 1461 - DNA, 12 bp, synthetic construct
  source 1..12: mol_type = other DNA
gccgccaccatg

SEQ ID NO: 1462 - DNA, 81 bp, synthetic construct
  source 1..81: mol_type = other DNA
gccgccaccatggacatgagggtccctgctcagctcctggggctcctgctgctctggctctcaggtgccagatgtgctgcc

SEQ ID NO: 1463 - DNA, 66 bp, synthetic construct
  source 1..66: mol_type = other DNA
gccgccaccatggaaatcaaggtgctgtttgccctcatctgtattgctgttgctgaggcagctgcc

SEQ ID NO: 1464 - DNA, 78 bp, synthetic construct
  source 1..78: mol_type = other DNA
gccgccaccatggagacagacacactcctgctatgggtactgctgctctgggttccaggttccactggtgacgctgcc

SEQ ID NO: 1465 - DNA, 57 bp, synthetic construct
  source 1..57: mol_type = other DNA
atgaacttcgggctcagcttgattttccttgtccttgttttaaaaggtgtccagtgt

SEQ ID NO: 1466 - DNA, 57 bp, synthetic construct
  source 1..57: mol_type = other DNA
atgggatggagctggatctttctctttctcctgtcaggaactacaggtgtcctctct

SEQ ID NO: 1467 - DNA, 57 bp, synthetic construct
  source 1..57: mol_type = other DNA
atgaagttgcctgttaggctgttggtgctgatgttctggattcctgcttccagcagt

SEQ ID NO: 1468 - DNA, 411 bp, synthetic construct
  source 1..411: mol_type = other DNA
atgaacttcgggctcagcttgattttccttgtccttgttttaaaaggtgtccagtgtgaggtgaagctggtggagagcggcggcgacctggtgaagcctggcggcagcctgaagctgagctgcgccgccagcggcttcaccttcagcagctacgccatgagctgggtgagacagaaccctgagaagagactggagtgggtggccagcatcagcaagggcggcaacacctactaccctaacagcgtgaagggcagattcaccatcagcagagacaacgccagaaacatcctgtacctgcagatgagcagcctgagaagcgaggacaccgccctgtactactgcgccagaggctggggcgactacggctggttcgcctactggggccaggtgaccctggtgaccgtgagcgcc

SEQ ID NO: 1469 - DNA, 45 bp, synthetic construct
  source 1..45: mol_type = other DNA
ggtggtggtggatccggaggaggaggaagtggaggtggaggttct

SEQ ID NO: 1470 - protein, 15 aa, synthetic construct
GGGGSGGGGSGGGGS

SEQ ID NO: 1471-1723 - skipped (253 entries)

SEQ ID NO: 1724 - DNA, 12 bp, synthetic construct
  source 1..12: mol_type = other DNA
agaaagaggcga

SEQ ID NO: 1725 - DNA, 12 bp, synthetic construct
  source 1..12: mol_type = other DNA
cgggccaagcgg

SEQ ID NO: 1726 - DNA, 54 bp, synthetic construct
  source 1..54: mol_type = other DNA
gagggcagaggaagtcttctaacatgcggtgacgtggaggagaatcccggccct

SEQ ID NO: 1727 - DNA, 75 bp, synthetic construct
  source 1..75: mol_type = other DNA
ggaagcggagtgaaacagactttgaattttgaccttctcaagttggcgggagacgtggagtccaaccctggacct

SEQ ID NO: 1728 - DNA, 66 bp, synthetic construct
  source 1..66: mol_type = other DNA
ggaagcggagctactaacttcagcctgctgaagcaggctggagacgtggaggagaaccctggacct

SEQ ID NO: 1729 - DNA, 18 bp, synthetic construct
  source 1..18: mol_type = other DNA
tccggaggcggcggcagc

SEQ ID NO: 1730 - DNA, 45 bp, synthetic construct
  source 1..45: mol_type = other DNA
ggtggtggtggtagcggcggcggcggctctggtggtggtggatcc

SEQ ID NO: 1731 - DNA, 75 bp, synthetic construct
  source 1..75: mol_type = other DNA
ggcggaggtggctccggaggcggaggcagcggcggaggtgggtctggcggaggcgggtgcggcggaggtggctcc

SEQ ID NO: 1732 - DNA, 609 bp, synthetic construct
  source 1..609: mol_type = other DNA
aattccgcccctctcccccccccccctctccctcccccccccctaacgttactggccgaagccgcttggaataaggccggtgtgcgtttgtctatatgttattttccaccatattgccgtcttttggcaatgtgagggcccggaaacctggccctgtcttcttgacgagcattcctaggggtctttcccctctcgccaaaggaatgcaaggtctgttgaatgtcgtgaaggaagcagttcctctggaagcttcttgaagacaaacaacgtctgtagcgaccctttgcaggcagcggaaccccccacctggcgacaggtgcctctgcggccaaaagccacgtgtataagatacacctgcaaaggcggcacaaccccagtgccacgttgtgagttggatagttgtggaaagagtcaaatggctctcctcaagcgtattcaacaaggggctgaaggatgcccagaaggtaccccattgtatgggatctgatctggggcctcggtgcacatgctttacatgtgtttagtcgaggttaaaaaaacgtctaggccccccgaaccacggggacgtggttttcctttgaaaaacacgatgataatatggccacaacc

SEQ ID NO: 1733 - DNA, 623 bp, synthetic construct
  source 1..623: mol_type = other DNA
taacgaattccgcccctctcccccccccccctctccctcccccccccctaacgttactggccgaagccgcttggaataaggccggtgtgcgtttgtctatatgttattttccaccatattgccgtcttttggcaatgtgagggcccggaaacctggccctgtcttcttgacgagcattcctaggggtctttcccctctcgccaaaggaatgcaaggtctgttgaatgtcgtgaaggaagcagttcctctggaagcttcttgaagacaaacaacgtctgtagcgaccctttgcaggcagcggaaccccccacctggcgacaggtgcctctgcggccaaaagccacgtgtataagatacacctgcaaaggcggcacaaccccagtgccacgttgtgagttggatagttgtggaaagagtcaaatggctctcctcaagcgtattcaacaaggggctgaaggatgcccagaaggtaccccattgtatgggatctgatctggggcctcggtgcacatgctttacatgtgtttagtcgaggttaaaaaaacgtctaggccccccgaaccacggggacgtggttttcctttgaaaaacacgatgataatatggccacaaccgccgccacc

SEQ ID NO: 1734 - DNA, 54 bp, synthetic construct
  source 1..54: mol_type = other DNA
gtggagaggaagtgctgcgtggagtgcccaccatgccctgcccctcctgtggcc

SEQ ID NO: 1735 - DNA, 108 bp, synthetic construct
  source 1..108: mol_type = other DNA
gagctcaaaaccccacttggtgacacaactcacacatgcccacggtgcccagagcccaaatcttgtgacacacctcccccgtgcccacggtgcccagcacctgaactc

SEQ ID NO: 1736 - DNA, 153 bp, synthetic construct
  source 1..153: mol_type = other DNA
gagctcaaaaccccacttggtgacacaactcacacatgcccacggtgcccagagcccaaatcttgtgacacacctcccccgtgcccacggtgcccagagcccaaatcttgtgacacacctcccccatgcccacggtgcccagcacctgaactc

SEQ ID NO: 1737 - DNA, 198 bp, synthetic construct
  source 1..198: mol_type = other DNA
gagctcaaaaccccacttggtgacacaactcacacatgcccacggtgcccagagcccaaatcttgtgacacacctcccccgtgcccacggtgcccagagcccaaatcttgtgacacacctcccccatgcccacggtgcccagagcccaaatcttgtgacacacctcccccgtgcccaaggtgcccagcacctgaactc

SEQ ID NO: 1738 - DNA, 45 bp, synthetic construct
  source 1..45: mol_type = other DNA
gtgcccagggattgtggttgtaagccttgcatatgtacagtccca

SEQ ID NO: 1739 - DNA, 18 bp, synthetic construct
  source 1..18: mol_type = other DNA
gtgcccagggattgtggt

SEQ ID NO: 1740-2075 - skipped (336 entries)

SEQ ID NO: 2076 - DNA, 130 bp, synthetic construct
  source 1..130: mol_type = other DNA
ctgcgcgctcgctcgctcactgaggccgcccgggcaaagcccgggcgtcgggcgacctttggtcgcccggcctcagtgagcgagcgagcgcgcagagagggagtggccaactccatcactaggggttcct

SEQ ID NO: 2077 - DNA, 141 bp, synthetic construct
  source 1..141: mol_type = other DNA
cctgcaggcagctgcgcgctcgctcgctcactgaggccgcccgggcaaagcccgggcgtcgggcgacctttggtcgcccggcctcagtgagcgagcgagcgcgcagagagggagtggccaactccatcactaggggttcct

SEQ ID NO: 2078 - DNA, 130 bp, synthetic construct
  source 1..130: mol_type = other DNA
aggaacccctagtgatggagttggccactccctctctgcgcgctcgctcgctcactgaggccgggcgaccaaaggtcgcccgacgcccgggctttgcccgggcggcctcagtgagcgagcgagcgcgcag

SEQ ID NO: 2079 - DNA, 141 bp, synthetic construct
  source 1..141: mol_type = other DNA
aggaacccctagtgatggagttggccactccctctctgcgcgctcgctcgctcactgaggccgggcgaccaaaggtcgcccgacgcccgggctttgcccgggcggcctcagtgagcgagcgagcgcgcagctgcctgcagg

SEQ ID NO: 2080 - DNA, 1715 bp, synthetic construct
  source 1..1715: mol_type = other DNA
ctagttattaatagtaatcaattacggggtcattagttcatagcccatatatggagttccgcgttacataacttacggtaaatggcccgcctggctgaccgcccaacgacccccgcccattgacgtcaataatgacgtatgttcccatagtaacgccaatagggactttccattgacgtcaatgggtggagtatttacggtaaactgcccacttggcagtacatcaagtgtatcatatgccaagtacgccccctattgacgtcaatgacggtaaatggcccgcctggcattatgcccagtacatgaccttatgggactttcctacttggcagtacatctacgtattagtcatcgctattaccatggtcgaggtgagccccacgttctgcttcactctccccatctcccccccctccccacccccaattttgtatttatttattttttaattattttgtgcagcgatgggggcggggggggggggggggcgcgcgccaggcggggcggggcggggcgaggggcggggcggggcgaggcggagaggtgcggcggcagccaatcagagcggcgcgctccgaaagtttccttttatggcgaggcggcggcggcggcggccctataaaaagcgaagcgcgcggcgggcgggagtcgctgcgcgctgccttcgccccgtgccccgctccgccgccgcctcgcgccgcccgccccggctctgactgaccgcgttactcccacaggtgagcgggcgggacggcccttctcctccgggctgtaattagcgcttggtttaatgacggcttgtttcttttctgtggctgcgtgaaagccttgaggggctccgggagggccctttgtgcggggggagcggctcggggggtgcgtgcgtgtgtgtgtgcgtggggagcgccgcgtgcggctccgcgctgcccggcggctgtgagcgctgcgggcgcggcgcggggctttgtgcgctccgcagtgtgcgcgaggggagcgcggccgggggcggtgccccgcggtgcggggggggctgcgaggggaacaaaggctgcgtgcggggtgtgtgcgtgggggggtgagcagggggtgtgggcgcgtcggtcgggctgcaaccccccctgcacccccctccccgagttgctgagcacggcccggcttcgggtgcggggctccgtacggggcgtggcgcggggctcgccgtgccgggcggggggtggcggcaggtgggggtgccgggcggggcggggccgcctcgggccggggagggctcgggggaggggcgcggcggcccccggagcgccggcggctgtcgaggcgcggcgagccgcagccattgccttttatggtaatcgtgcgagagggcgcagggacttcctttgtcccaaatctgtgcggagccgaaatctgggaggcgccgccgcaccccctctagcgggcgcggggcgaagcggtgcggcgccggcaggaaggaaatgggcggggagggccttcgtgcgtcgccgcgccgccgtccccttctccctctccagcctcggggctgtccgcggggggacggctgccttcgggggggacggggcagggcggggttcggcttctggcgtgtgaccggcggctctagagcctctgctaaccatgttcatgccttcttctttttcctacagctcctgggcaacgtgctggttattgtgctgtctcatcattttggcaaagaattc

SEQ ID NO: 2081 - DNA, 299 bp, synthetic construct
  source 1..299: mol_type = other DNA
tagcccatatatggagttccgcgttacataacttacggtaaatggcccgcctggctgaccgcccaacgacccccgcccattgacgtcaataatgacgtatgttcccatagtaacgccaatagggactttccattgacgtcaatgggtggagtatttacggtaaactgcccacttggcagtacatcaagtgtatcatatgccaagtacgccccctattgacgtcaatgacggtaaatggcccgcctggcattatgcccagtacatgaccttatgggactttcctacttggcagtacatct

SEQ ID NO: 2082 - DNA, 283 bp, synthetic construct
  source 1..283: mol_type = other DNA
catggtcgaggtgagccccacgttctgcttcactctccccatctcccccccctccccacccccaattttgtatttatttattttttaattattttgtgcagcgatgggggcggggggggggggggggcgcgcgccaggcggggcggggcggggcgaggggcggggcggggcgaggcggagaggtgcggcggcagccaatcagagcggcgcgctccgaaagtttccttttatggcgaggcggcggcggcggcggccctataaaaagcgaagcgcgcggcgggcg

SEQ ID NO: 2083 - DNA, 260 bp, synthetic construct
  source 1..260: mol_type = other DNA
ccacgttctgcttcactctccccatctcccccccctccccacccccaattttgtatttatttattttttaattattttgtgcagcgatgggggcggggggggggggcgcgcgccaggcggggcggggcggggcgaggggcggggcggggcgaggcggagaggtgcggcggcagccaatcagagcggcgcgctccgaaagtttccttttatggcgaggcggcggcggcggcggccctataaaaagcgaagcgcgcggcggg

SEQ ID NO: 2084 - DNA, 654 bp, synthetic construct
  source 1..654: mol_type = other DNA
cgacattgattattgactagttattaatagtaatcaattacggggtcattagttcatagcccatatatggagttccgcgttacataacttacggtaaatggcccgcctggctgaccgcccaacgacccccgcccattgacgtcaataatgacgtatgttcccatagtaacgccaatagggactttccattgacgtcaatgggtggagtatttacggtaaactgcccacttggcagtacatcaagtgtatcatatgccaagtacgccccctattgacgtcaatgacggtaaatggcccgcctggcattatgcccagtacatgaccttatgggactttcctacttggcagtacatctacgtattagtcatcgctattaccatgtcgaggccacgttctgcttcactctccccatctcccccccctccccacccccaattttgtatttatttattttttaattattttgtgcagcgatgggggcggggggggggggcgcgcgccaggcggggcggggcggggcgaggggcggggcggggcgaggcggagaggtgcggcggcagccaatcagagcggcgcgctccgaaagtttccttttatggcgaggcggcggcggcggcggccctataaaaagcgaagcgcgcggcgggcgggagc

SEQ ID NO: 2085 - DNA, 699 bp, synthetic construct
  source 1..699: mol_type = other DNA
gatctaacatatcctggtgtggagtagcggacgctgctatgacagaggctcgggggcctgagctggctctgtgagctggggaggaggcagacagccaggccttgtctgcaagcagacctggcagcattgggctggccgccccccagggcctcctcttcatgcccagtgaatgactcaccttggcacagacacaatgttcggggtgggcacagtgcctgcttcccgccgcaccccagcccccctcaaatgccttccgagaagcccattgagcagggggcttgcattgcaccccagcctgacagcctggcatcttgggataaaagcagcacagccccctaggggctgcccttgctgtgtggcgccaccggcggtggagaacaaggctctattcagcctgtgcccaggaaaggggatcaggggatgcccaggcatggacagtgggtggcagggggggagaggagggctgtctgcttcccagaagtccaaggacacaaatgggtgaggggagagctctccccatagctgggctgcggcccaaccccaccccctcaggctatgccagggggtgttgccaggggcacccgggcatcgccagtctagcccactccttcataaagccctcgcatcccaggagcgagcagagccagagcaggttggagaggagacgcatcacctccgctgctcgcggggatcctctag

SEQ ID NO: 2086 - DNA, 557 bp, synthetic construct
  source 1..557: mol_type = other DNA
tagtatctgcagagggccctgcgtatgagtgcaagtgggttttaggaccaggatgaggcggggtgggggtgcctacctgacgaccgaccccgacccactggacaagcacccaacccccattccccaaattgcgcatcccctatcagagagggggaggggaaacaggatgcggcgaggcgcgtgcgcactgccagcttcagcaccgcggacagtgccttcgcccccgcctggcggcgcgcgccaccgccgcctcagcactgaaggcgcgctgacgtcactcgccggtcccccgcaaactccccttcccggccaccttggtcgcgtccgcgccgccgccggcccagccggaccgcaccacgcgaggcgcgagataggggggcacgggcgcgaccatctgcgctgcggcgccggcgactcagcgctgcctcagtctgcggtgggcagcggaggagtcgtgtcgtgcctgagagcgcagctgtgctcctgggcaccgcgcagtccgcccccgcggctcctggccagaccacccctaggaccccctgccccaagtcgcagcc

SEQ ID NO: 2087 - DNA, 382 bp, synthetic construct
  source 1..382: mol_type = other DNA
ctagtcgacattgattattgactagttattaatagtaatcaattacggggtcattagttcatagcccatatatggagttccgcgttacataacttacggtaaatggcccgcctggctgaccgcccaacgacccccgcccattgacgtcaataatgacgtatgttcccatagtaacgccaatagggactttccattgacgtcaatgggtggagtatttacggtaaactgcccacttggcagtacatcaagtgtatcatatgccaagtacgccccctattgacgtcaatgacggtaaatggcccgcctggcattatgcccagtacatgaccttatgggactttcctacttggcagtacatctacgtattagtcatcgctattac

SEQ ID NO: 2088 - DNA, 1736 bp, synthetic construct
  source 1..1736: mol_type = other DNA
ctagtcgacattgattattgactagttattaatagtaatcaattacggggtcattagttcatagcccatatatggagttccgcgttacataacttacggtaaatggcccgcctggctgaccgcccaacgacccccgcccattgacgtcaataatgacgtatgttcccatagtaacgccaatagggactttccattgacgtcaatgggtggagtatttacggtaaactgcccacttggcagtacatcaagtgtatcatatgccaagtacgccccctattgacgtcaatgacggtaaatggcccgcctggcattatgcccagtacatgaccttatgggactttcctacttggcagtacatctacgtattagtcatcgctattaccatggtcgaggtgagccccacgttctgcttcactctccccatctcccccccctccccacccccaattttgtatttatttattttttaattattttgtgcagcgatgggggcggggggggggggggggcgcgcgccaggcggggcggggcggggcgaggggcggggcggggcgaggcggagaggtgcggcggcagccaatcagagcggcgcgctccgaaagtttccttttatggcgaggcggcggcggcggcggccctataaaaagcgaagcgcgcggcgggcgggagtcgctgcgcgctgccttcgccccgtgccccgctccgccgccgcctcgcgccgcccgccccggctctgactgaccgcgttactcccacaggtgagcgggcgggacggcccttctcctccgggctgtaattagcgcttggtttaatgacggcttgtttcttttctgtggctgcgtgaaagccttgaggggctccgggagggccctttgtgcggggggagcggctcggggggtgcgtgcgtgtgtgtgtgcgtggggagcgccgcgtgcggctccgcgctgcccggcggctgtgagcgctgcgggcgcggcgcggggctttgtgcgctccgcagtgtgcgcgaggggagcgcggccgggggcggtgccccgcggtgcggggggggctgcgaggggaacaaaggctgcgtgcggggtgtgtgcgtgggggggtgagcagggggtgtgggcgcgtcggtcgggctgcaaccccccctgcacccccctccccgagttgctgagcacggcccggcttcgggtgcggggctccgtacggggcgtggcgcggggctcgccgtgccgggcggggggtggcggcaggtgggggtgccgggcggggcggggccgcctcgggccggggagggctcgggggaggggcgcggcggcccccggagcgccggcggctgtcgaggcgcggcgagccgcagccattgccttttatggtaatcgtgcgagagggcgcagggacttcctttgtcccaaatctgtgcggagccgaaatctgggaggcgccgccgcaccccctctagcgggcgcggggcgaagcggtgcggcgccggcaggaaggaaatgggcggggagggccttcgtgcgtcgccgcgccgccgtccccttctccctctccagcctcggggctgtccgcggggggacggctgccttcgggggggacggggcagggcggggttcggcttctggcgtgtgaccggcggctctagagcctctgctaaccatgttcatgccttcttctttttcctacagctcctgggcaacgtgctggttattgtgctgtctcatcattttggcaaagaattc

SEQ ID NO: 2089 - DNA, 365 bp, synthetic construct
  source 1..365: mol_type = other DNA
ctagtcgacattgattattgactagttattaatagtaatcaattacggggtcattagttcatagcccatatatggagttccgcgttacataacttacggtaaatggcccgcctggctgaccgcccaacgacccccgcccattgacgtcaataatgacgtatgttcccatagtaacgccaatagggactttccattgacgtcaatgggtggagtatttacggtaaactgcccacttggcagtacatcaagtgtatcatatgccaagtacgccccctattgacgtcaatgacggtaaatggcccgcctggcattatgcccagtacatgaccttatgggactttcctacttggcagtacatctacgta

SEQ ID NO: 2090 - DNA, 134 bp, synthetic construct
  source 1..134: mol_type = other DNA
tcagatcgcctggagacgccatccacgctgttttgacctccatagaagacaccgggaccgatccagcctccgcggattcgaatcccggccgggaacggtgcattggaacgcggattccccgtgccaagagtgac

SEQ ID NO: 2091 - DNA, 102 bp, synthetic construct
  source 1..102: mol_type = other DNA
ttgacctccatagaagacaccgggaccgatccagcctccgcggattcgaatcccggccgggaacggtgcattggaacgcggattccccgtgccaagagtgac

SEQ ID NO: 2092 - DNA, 59 bp, synthetic construct
  source 1..59: mol_type = other DNA
attcgaatcccggccgggaacggtgcattggaacgcggattccccgtgccaagagtgac

SEQ ID NO: 2093 - DNA, 53 bp, synthetic construct
  source 1..53: mol_type = other DNA
ctcctgggcaacgtgctggtctgtgtgctggcccatcactttggcaaagaatt

SEQ ID NO: 2094 - DNA, 54 bp, synthetic construct
  source 1..54: mol_type = other DNA
ctcctgggcaacgtgctggttattgtgctgtctcatcattttggcaaagaattc

SEQ ID NO: 2095 - DNA, 32 bp, synthetic construct
  source 1..32: mol_type = other DNA
gtaagtaccgcctatagagtctataggcccac

SEQ ID NO: 2096 - DNA, 15 bp, synthetic construct
  source 1..15: mol_type = other DNA
gtaagtaccgcctat

SEQ ID NO: 2097 - DNA, 347 bp, synthetic construct
  source 1..347: mol_type = other DNA
aaaaaatgctttcttcttttaatatacttttttgtttatcttatttctaatactttccctaatctctttctttcagggcaataatgatacaatgtatcatgcctctttgcaccattctaaagaataacagtgataatttctgggttaaggcaatagcaatatttctgcatataaatatttctgcatataaattgtaactgatgtaagaggtttcatattgctaatagcagctacaatccagctaccattctgcttttattttatggttgggataaggctggattattctgagtccaagctaggcccttttgctaatcatgttcatacctcttatcttcctcccacag

SEQ ID NO: 2098 - DNA, 168 bp, synthetic construct
  source 1..168: mol_type = other DNA
tctgcatataaattgtaactgatgtaagaggtttcatattgctaatagcagctacaatccagctaccattctgcttttattttatggttgggataaggctggattattctgagtccaagctaggcccttttgctaatcatgttcatacctcttatcttcctcccacag

SEQ ID NO: 2099 - DNA, 73 bp, synthetic construct
  source 1..73: mol_type = other DNA
aaaaaatgctttcttcttttaatatacttttcttttgctaatcatgttcatacctcttatcttcctcccacag

SEQ ID NO: 2100 - DNA, 73 bp, synthetic construct
  source 1..73: mol_type = other DNA
aggctggattattctgagtccaagctaggcccttttgctaatcatgttcatacctcttatcttcctcccacag

SEQ ID NO: 2101 - DNA, 73 bp, synthetic construct
  source 1..73: mol_type = other DNA
aaaaaatgctttcttcttttcaagctaggcccttttgctaatcatgttcatacctcttatcttcctcccacag

SEQ ID NO: 2102 - DNA, 53 bp, synthetic construct
  source 1..53: mol_type = other DNA
caagctaggcccttttgctaatcatgttcatacctcttatcttcctcccacag

SEQ ID NO: 2103 - DNA, 172 bp, synthetic construct
  source 1..172: mol_type = other DNA
gaactgaaaaaccagaaagttaactggtaagtttagtctttttgtcttttatttcaggtcccggatccggtggtggtgcaaatcaaagaactgctcctcagtggatgttgcctttacttctaggcctgtacggaagtgttacttctgctctaaaagctgcggaattgtaccc

SEQ ID NO: 2104 - DNA, 1074 bp, synthetic construct
  source 1..1074: mol_type = other DNA
ggagtcgctgcgcgctgccttcgccccgtgccccgctccgccgccgcctcgcgccgcccgccccggctctgactgaccgcgttactcccacaggtgagcgggcgggacggcccttctcctccgggctgtaattagcgcttggtttaatgacggcttgtttcttttctgtggctgcgtgaaagccttgaggggctccgggagggccctttgtgcggggggagcggctcggggggtgcgtgcgtgtgtgtgtgcgtggggagcgccgcgtgcggctccgcgctgcccggcggctgtgagcgctgcgggcgcggcgcggggctttgtgcgctccgcagtgtgcgcgaggggagcgcggccgggggcggtgccccgcggtgcggggggggctgcgaggggaacaaaggctgcgtgcggggtgtgtgcgtgggggggtgagcagggggtgtgggcgcgtcggtcgggctgcaaccccccctgcacccccctccccgagttgctgagcacggcccggcttcgggtgcggggctccgtacggggcgtggcgcggggctcgccgtgccgggcggggggtggcggcaggtgggggtgccgggcggggcggggccgcctcgggccggggagggctcgggggaggggcgcggcggcccccggagcgccggcggctgtcgaggcgcggcgagccgcagccattgccttttatggtaatcgtgcgagagggcgcagggacttcctttgtcccaaatctgtgcggagccgaaatctgggaggcgccgccgcaccccctctagcgggcgcggggcgaagcggtgcggcgccggcaggaaggaaatgggcggggagggccttcgtgcgtcgccgcgccgccgtccccttctccctctccagcctcggggctgtccgcggggggacggctgccttcgggggggacggggcagggcggggttcggcttctggcgtgtgaccggcggctctagagcctctgctaaccatgttcatgccttcttctttttcctacagctcctgggcaacgtgctggttattgtgctgtctcatcattttggcaaagaattcgag

SEQ ID NO: 2105 - DNA, 41 bp, synthetic construct
  source 1..41: mol_type = other DNA
cctctgctaaccatgttcatgccttcttctttttcctacag

SEQ ID NO: 2106-2113 - skipped (8 entries)

SEQ ID NO: 2114 - DNA, 12 bp, synthetic construct
  source 1..12: mol_type = other DNA
gccgccaccatg

SEQ ID NO: 2115-2121 - skipped (7 entries)

SEQ ID NO: 2122 - DNA, 127 bp, synthetic construct
  source 1..127: mol_type = other DNA
gatctttttccctctgccaaaaattatggggacatcatgaagccccttgagcatctgacttctggctaataaaggaaatttattttcattgcaatagtgtgttggaattttttgtgtctctcactcg

SEQ ID NO: 2123 - DNA, 477 bp, synthetic construct
  source 1..477: mol_type = other DNA
gggtggcatccctgtgacccctccccagtgcctctcctggccctggaagttgccactccagtgcccaccagccttgtcctaataaaattaagttgcatcattttgtctgactaggtgtccttctataatattatggggtggaggggggtggtatggagcaaggggcaagttgggaagacaacctgtagggcctgcggggtctattgggaaccaagctggagtgcagtggcacaatcttggctcactgcaatctccgcctcctgggttcaagcgattctcctgcctcagcctcccgagttgttgggattccaggcatgcatgaccaggctcagctaatttttgtttttttggtagagacggggtttcaccatattggccaggctggtctccaactcctaatctcaggtgatctacccaccttggcctcccaaattgctgggattacaggcgtgaaccactgctcccttccctgtcctt

SEQ ID NO: 2124 - DNA, 552 bp, synthetic construct
  source 1..552: mol_type = other DNA
gaattcactcctcaggtgcaggctgcctatcagaaggtggtggctggtgtggccaatgccctggctcacaaataccactgagatctttttccctctgccaaaaattatggggacatcatgaagccccttgagcatctgacttctggctaataaaggaaatttattttcattgcaatagtgtgttggaattttttgtgtctctcactcggaaggacatatgggagggcaaatcatttaaaacatcagaatgagtatttggtttagagtttggcaacatatgcccatatgctggctgccatgaacaaaggttggctataaagaggtcatcagtatatgaaacagccccctgctgtccattccttattccatagaaaagccttgacttgaggttagattttttttatattttgttttgtgttatttttttctttaacatccctaaaattttccttacatgttttactagccagatttttcctcctctcctgactactcccagtcatagctgtccctcttctcttatggagatccctcgacctgcagcccaagctt

SEQ ID NO: 2125-2237 - skipped (113 entries)

SEQ ID NO: 2238 - DNA, 1714 bp, synthetic construct
  source 1..1714: mol_type = other DNA
ctagttattaatagtaatcaattacggggtcattagttcatagcccatatatggagttccgcgttacataacttacggtaaatggcccgcctggctgaccgcccaacgacccccgcccattgacgtcaataatgacgtatgttcccatagtaacgccaatagggactttccattgacgtcaatgggtggagtatttacggtaaactgcccacttggcagtacatcaagtgtatcatatgccaagtacgccccctattgacgtcaatgacggtaaatggcccgcctggcattatgcccagtacatgaccttatgggactttcctacttggcagtacatctacgtattagtcatcgctattaccatggtcgaggtgagccccacgttctgcttcactctccccatctcccccccctccccacccccaattttgtatttatttattttttaattattttgtgcagcgatgggggcggggggggggggggggcgcgcgccaggcggggcggggcggggcgaggggcggggcggggcgaggcggagaggtgcggcggcagccaatcagagcggcgcgctccgaaagtttccttttatggcgaggcggcggcggcggcggccctataaaaagcgaagcgcgcggcgggcgggagtcgctgcgcgctgccttcgccccgtgccccgctccgccgccgcctcgcgccgcccgccccggctctgactgaccgcgttactcccacaggtgagcgggcgggacggcccttctcctccgggctgtaattagcgcttggtttaatgacggcttgtttcttttctgtggctgcgtgaaagccttgaggggctccgggagggccctttgtgcggggggagcggctcggggggtgcgtgcgtgtgtgtgtgcgtggggagcgccgcgtgcggctccgcgctgcccggcggctgtgagcgctgcgggcgcggcgcggggctttgtgcgctccgcagtgtgcgcgaggggagcgcggccgggggcggtgccccgcggtgcggggggggctgcgaggggaacaaaggctgcgtgcggggtgtgtgcgtgggggggtgagcagggggtgtgggcgcgtcggtcgggctgcaaccccccctgcacccccctccccgagttgctgagcacggcccggcttcgggtgcggggctccgtacggggcgtggcgcggggctcgccgtgccgggcggggggtggcggcaggtgggggtgccgggcggggcggggccgcctcgggccggggagggctcgggggaggggcgcggcggcccccggagcgccggcggctgtcgaggcgcggcgagccgcagccattgccttttatggtaatcgtgcgagagggcgcagggacttcctttgtcccaaatctgtgcggagccgaaatctgggaggcgccgccgcaccccctctagcgggcgcggggcgaagcggtgcggcgccggcaggaaggaaatgggcggggagggccttcgtgcgtcgccgcgccgccgtccccttctccctctccagcctcggggctgtccgcggggggacggctgccttcgggggggacggggcagggcggggttcggcttctggcgtgtgaccggcggctctagagcctctgctaaccatgttcatgccttcttctttttcctacagctcctgggcaacgtgctggttattgtgctgtctcatcattttggcaaagaatt

SEQ ID NO: 2239 - DNA, 380 bp, synthetic construct
  source 1..380: mol_type = other DNA
gacattgattattgactagttattaatagtaatcaattacggggtcattagttcatagcccatatatggagttccgcgttacataacttacggtaaatggcccgcctggctgaccgcccaacgacccccgcccattgacgtcaataatgacgtatgttcccatagtaacgccaatagggactttccattgacgtcaatgggtggagtatttacggtaaactgcccacttggcagtacatcaagtgtatcatatgccaagtacgccccctattgacgtcaatgacggtaaatggcccgcctggcattatgcccagtacatgaccttatgggactttcctacttggcagtacatctacgtattagtcatcgctattaccatg

SEQ ID NO: 2240 - DNA, 566 bp, synthetic construct
  source 1..566: mol_type = other DNA
tcagatcgcctggagacgccatccacgctgttttgacctccatagaagacaccgggaccgatccagcctccgcggattcgaatcccggccgggaacggtgcattggaacgcggattccccgtgccaagagtgacgtaagtaccgcctatagagtctataggcccacaaaaaatgctttcttcttttaatatacttttttgtttatcttatttctaatactttccctaatctctttctttcagggcaataatgatacaatgtatcatgcctctttgcaccattctaaagaataacagtgataatttctgggttaaggcaatagcaatatttctgcatataaatatttctgcatataaattgtaactgatgtaagaggtttcatattgctaatagcagctacaatccagctaccattctgcttttattttatggttgggataaggctggattattctgagtccaagctaggcccttttgctaatcatgttcatacctcttatcttcctcccacagctcctgggcaacgtgctggtctgtgtgctggcccatcactttggcaaagaatt

SEQ ID NO: 2241-2243 - skipped (3 entries)

SEQ ID NO: 2244 - DNA, 198 bp, synthetic construct
  source 1..198: mol_type = other DNA
gagctcaaaaccccacttggtgacacaactcacacatgcccacggtgcccagagcccaaatcttgtgacacacctcccccgtgcccacggtgcccagagcccaaatcttgtgacacaactcacacatgcccacggtgcccagagcccaaatcttgtgacacacctcccccgtgcccaaggtgcccagcacctgaactc

SEQ ID NO: 2245 - DNA, 15 bp, synthetic construct
  source 1..15: mol_type = other DNA
ggtggtggtggatcc

SEQ ID NO: 2246 - DNA, 30 bp, synthetic construct
  source 1..30: mol_type = other DNA
ggtggtggtggatccggtggtggtggatcc

SEQ ID NO: 2247 - DNA, 45 bp, synthetic construct
  source 1..45: mol_type = other DNA
ggtggtggtggatccggtggtggtggatccggtggtggtggatcc

SEQ ID NO: 2248 - DNA, 60 bp, synthetic construct
  source 1..60: mol_type = other DNA
ggtggtggtggatccggtggtggtggatccggtggtggtggatccggtggtggtggatcc

SEQ ID NO: 2249 - DNA, 75 bp, synthetic construct
  source 1..75: mol_type = other DNA
ggtggtggtggtagcggcggcggcggctctggtggtggtggatccggtggtggtggatccggtggtggtggatcc

SEQ ID NO: 2250 - DNA, 75 bp, synthetic construct
  source 1..75: mol_type = other DNA
ggtggtggtggatccggtggtggtggatccggtggtggtggatccggtggtggtggatccggtggtggtggatcc

SEQ ID NO: 2251 - DNA, 90 bp, synthetic construct
  source 1..90: mol_type = other DNA
ggtggtggtggtagcggcggcggcggctctggtggtggtggatccggtggtggtggatccggtggtggtggatccggtggtggtggatcc

SEQ ID NO: 2252 - DNA, 120 bp, synthetic construct
  source 1..120: mol_type = other DNA
ggtggtggtggtagcggcggcggcggctctggtggtggtggatccggtggtggtggatccggtggtggtggatccggtggtggtggatccggtggtggtggatccggtggtggtggatcc

SEQ ID NO: 2253 - DNA, 120 bp, synthetic construct
  source 1..120: mol_type = other DNA
ggtggtggtggatccggtggtggtggatccggtggtggtggatccggtggtggtggatccggtggtggtggatccggtggtggtggatccggtggtggtggatccggtggtggtggatcc

SEQ ID NO: 2254 - DNA, 60 bp, synthetic construct
  source 1..60: mol_type = other DNA
ggtggtggtggtagcggcggcggcggctctggtggtggtggatccggtggtggtggatcc

SEQ ID NO: 2255 - skipped

SEQ ID NO: 2256 - DNA, 491 bp, synthetic construct
  source 1..491: mol_type = other DNA
attcgaatcccggccgggaacggtgcattggaacgcggattccccgtgccaagagtgacgtaagtaccgcctatagagtctataggcccacaaaaaatgctttcttcttttaatatacttttttgtttatcttatttctaatactttccctaatctctttctttcagggcaataatgatacaatgtatcatgcctctttgcaccattctaaagaataacagtgataatttctgggttaaggcaatagcaatatttctgcatataaatatttctgcatataaattgtaactgatgtaagaggtttcatattgctaatagcagctacaatccagctaccattctgcttttattttatggttgggataaggctggattattctgagtccaagctaggcccttttgctaatcatgttcatacctcttatcttcctcccacagctcctgggcaacgtgctggtctgtgtgctggcccatcactttggcaaagaatt

SEQ ID NO: 2257 - DNA, 387 bp, synthetic construct
  source 1..387: mol_type = other DNA
tcagatcgcctggagacgccatccacgctgttttgacctccatagaagacaccgggaccgatccagcctccgcggattcgaatcccggccgggaacggtgcattggaacgcggattccccgtgccaagagtgacgtaagtaccgcctatagagtctataggcccactctgcatataaattgtaactgatgtaagaggtttcatattgctaatagcagctacaatccagctaccattctgcttttattttatggttgggataaggctggattattctgagtccaagctaggcccttttgctaatcatgttcatacctcttatcttcctcccacagctcctgggcaacgtgctggtctgtgtgctggcccatcactttggcaaagaatt

SEQ ID NO: 2258 - DNA, 292 bp, synthetic construct
  source 1..292: mol_type = other DNA
tcagatcgcctggagacgccatccacgctgttttgacctccatagaagacaccgggaccgatccaggtaagtaccgcctatagagtctataggcccacaaaaaatgctttcttcttttaatatacttttttgtttatcttatttctaatactttccctaatctctttcgctggattattctgagtccaagctaggcccttttgctaatcatgttcatacctcttatcttcctcccacagctcctgggcaacgtgctggtctgtgtgctggcccatcactttggcaaagaatt

SEQ ID NO: 2259 - DNA, 90 bp, synthetic construct
  source 1..90: mol_type = other DNA
ggtggtggtggatccggtggtggtggatccggtggtggtggatccggtggtggtggatccggtggtggtggatccggtggtggtggatcc

SEQ ID NO: 2260-3622 - skipped (1363 entries)

SEQ ID NO: 3623 - DNA, 2232 bp, synthetic construct
  source 1..2232: mol_type = other DNA
atggctgccgatggttatcttccagattggctcgaggacaaccttagtgaaggaattcgcgagtggtgggctttgaaacctggagcccctcaacccaaggcaaatcaacaacatcaagacaacgctcgaggtcttgtgcttccgggttacaaataccttggacccggcaacggactcgacaagggggagccggtcaacgcagcagacgcggcggccctcgagcacgacaaggcctacgaccagcagctcaaggccggagacaacccgtacctcaagtacaaccacgccgacgccgagttccaggagcggctcaaagaagatacgtcttttgggggcaacctcgggcgagcagtcttccaggccaaaaagaggcttcttgaacctcttggtctggttgaggaagcggctaagacggctcctggaaagaagaggcctgtagagcagtctcctcaggaaccggactcctccgcgggtattggcaaatcgggtgcacagcccgctaaaaagagactcaatttcggtcagactggcgacacagagtcagtcccagaccctcaaccaatcggagaacctcccgcagccccctcaggtgtgggatctcttacaatggcttcaggtggtggcgcaccagtggcagacaataacgaaggtgccgatggagtgggtagttcctcgggaaattggcattgcgattcccaatggctgggggacagagtcatcaccaccagcacccgaacctgggccctgcccacctacaacaatcacctctacaagcaaatctccaacagcacatctggaggatcttcaaatgacaacgcctacttcggctacagcaccccctgggggtattttgacttcaacagattccactgccacttctcaccacgtgactggcagcgactcatcaacaacaactggggattccggcctaagcgactcaacttcaagctcttcaacattcaggtcaaagaggttacggacaacaatggagtcaagaccatcgccaataaccttaccagcacggtccaggtcttcacggactcagactatcagctcccgtacgtgctcgggtcggctcacgagggctgcctcccgccgttcccagcggacgttttcatgattcctcagtacgggtatctgacgcttaatgatggaagccaggccgtgggtcgttcgtccttttactgcctggaatatttcccgtcgcaaatgctaagaacgggtaacaacttccagttcagctacgagtttgagaacgtacctttccatagcagctacgctcacagccaaagcctggaccgactaatgaatccactcatcgaccaatacttgtactatctctcaaagactattaacggttctggacagaatcaacaaacgctaaaattcagtgtggccggacccagcaacatggctgtccagggaagaaactacatacctggacccagctaccgacaacaacgtgtctcaaccactgtgactcaaaacaacaacagcgaatttgcttggcctggagcttcttcttgggctctcaatggacgtaatagcttgatgaatcctggacctgctatggccagccacaaagaaggagaggaccgtttctttcctttgtctggatctttaatttttggcaaacaaggaactggaagagacaacgtggatgcggacaaagtcatgataaccaacgaagaagaaattaaaactactaacccggtagcaacggagtcctatggacaagtggccacaaaccaccagagtccgcttaatggtgccgtccatctttatgctcaggcgcagaccggctgggttcaaaaccaaggaatacttccgggtatggtttggcaggacagagatgtgtacctgcaaggacccatttgggccaaaattcctcacacggacggcaactttcacccttctccgctgatgggagggtttggaatgaagcacccgcctcctcagatcctcatcaaaaacacacctgtacctgccgatcctccaacggccttcaacaaggacaagctgaactctttcatcacccagtattctactggccaagtcagcgtggagatcgagtgggagctgcagaaggaaaacagcaagcggtggaacccggagatccagtacacttccaactattacaagtctaataatgttgaatttgctgttaatactgaaggtgtatatagtgaaccccgccccattggcaccagatacctgactcgtaatctgtaa

SEQ ID NO: 3624 - DNA, 2232 bp, synthetic construct
  source 1..2232: mol_type = other DNA
atggctgccgatggttatcttccagattggctcgaggacaaccttagtgaaggaattcgcgagtggtgggctttgaaacctggagcccctcaacccaaggcaaatcaacaacatcaagacaacgctcgaggtcttgtgcttccgggttacaaataccttggacccggcaacggactcgacaagggggagccggtcaacgcagcagacgcggcggccctcgagcacgacaaggcctacgaccagcagctcaaggccggagacaacccgtacctcaagtacaaccacgccgacgccgagttccaggagcggctcaaagaagatacgtcttttgggggcaacctcgggcgagcagtcttccaggccaaaaagaggcttcttgaacctcttggtctggttgaggaagcggctaagacggctcctggaaagaagaggcctgtagagcagtctcctcaggaaccggactcctccgcgggtattggcaaatcgggtgcacagcccgctaaaaagagactcaatttcggtcagactggcgacacagagtcagtcccagaccctcaaccaatcggagaacctcccgcagccccctcaggtgtgggatctcttacaatggcttcaggtggtggcgcaccagtggcagacaataacgaaggtgccgatggagtgggtagttcctcgggaaattggcattgcgattcccaatggctgggggacagagtcatcaccaccagcacccgaacctgggccctgcccacctacaacaatcacctctacaagcaaatctccaacagcacatctggaggatcttcaaatgacaacgcctacttcggctacagcaccccctgggggtattttgacttcaacagattccactgccacttctcaccacgtgactggcagcgactcatcaacaacaactggggattccggcctaagcgactcaacttcaagctcttcaacattcaggtcaaagaggttacggacaacaatggagtcaagaccatcgccaataaccttaccagcacggtccaggtcttcacggactcagactatcagctcccgtacgtgctcgggtcggctcacgagggctgcctcccgccgttcccagcggacgttttcatgattcctcagtacgggtatctgacgcttaatgatggaagccaggccgtgggtcgttcgtccttttactgcctggaatatttcccgtcgcaaatgctaagaacgggtaacaacttccagttcagctacgagtttgagaacgtacctttccatagcagctacgctcacagccaaagcctggaccgactaatgaatccactcatcgaccaatacttgtactatctctcaaagactattaacggttctggacagaatcaacaaacgctaaaattcagtgtggccggacccagcaacatggctgtccagggaagaaactacatacctggacccagctaccgacaacaacgtgtctcaaccactgtgactcaaaacaacaacagcgaatttgcttggcctggagcttcttcttgggctctcaatggacgtaatagcttgatgaatcctggacctgctatggccagccacaaagaaggagaggaccgtttctttcctttgtctggatctttaatttttggcaaacaaggaactggaagagacaacgtggatgcggacaaagtcatgataaccaacgaagaagaaattaaaactactaacccggtagcaacggagtcctatggacaagtggccacaaaccaccagagtgcacaggctcgtgattctccgaagggttggcaggcgcagaccggctgggttcaaaaccaaggaatacttccgggtatggtttggcaggacagagatgtgtacctgcaaggacccatttgggccaaaattcctcacacggacggcaactttcacccttctccgctgatgggagggtttggaatgaagcacccgcctcctcagatcctcatcaaaaacacacctgtacctgccgatcctccaacggccttcaacaaggacaagctgaactctttcatcacccagtattctactggccaagtcagcgtggagatcgagtgggagctgcagaaggaaaacagcaagcggtggaacccggagatccagtacacttccaactattacaagtctaataatgttgaatttgctgttaatactgaaggtgtatatagtgaaccccgccccattggcaccagatacctgactcgtaatctgtaa

SEQ ID NO: 3625 - DNA, 2232 bp, synthetic construct
  source 1..2232: mol_type = other DNA
atggctgccgatggttatcttccagattggctcgaggacaaccttagtgaaggaattcgcgagtggtgggctttgaaacctggagcccctcaacccaaggcaaatcaacaacatcaagacaacgctcgaggtcttgtgcttccgggttacaaataccttggacccggcaacggactcgacaagggggagccggtcaacgcagcagacgcggcggccctcgagcacgacaaggcctacgaccagcagctcaaggccggagacaacccgtacctcaagtacaaccacgccgacgccgagttccaggagcggctcaaagaagatacgtcttttgggggcaacctcgggcgagcagtcttccaggccaaaaagaggcttcttgaacctcttggtctggttgaggaagcggctaagacggctcctggaaagaagaggcctgtagagcagtctcctcaggaaccggactcctccgcgggtattggcaaatcgggtgcacagcccgctaaaaagagactcaatttcggtcagactggcgacacagagtcagtcccagaccctcaaccaatcggagaacctcccgcagccccctcaggtgtgggatctcttacaatggcttcaggtggtggcgcaccagtggcagacaataacgaaggtgccgatggagtgggtagttcctcgggaaattggcattgcgattcccaatggctgggggacagagtcatcaccaccagcacccgaacctgggccctgcccacctacaacaatcacctctacaagcaaatctccaacagcacatctggaggatcttcaaatgacaacgcctacttcggctacagcaccccctgggggtattttgacttcaacagattccactgccacttctcaccacgtgactggcagcgactcatcaacaacaactggggattccggcctaagcgactcaacttcaagctcttcaacattcaggtcaaagaggttacggacaacaatggagtcaagaccatcgccaataaccttaccagcacggtccaggtcttcacggactcagactatcagctcccgtacgtgctcgggtcggctcacgagggctgcctcccgccgttcccagcggacgttttcatgattcctcagtacgggtatctgacgcttaatgatggaagccaggccgtgggtcgttcgtccttttactgcctggaatatttcccgtcgcaaatgctaagaacgggtaacaacttccagttcagctacgagtttgagaacgtacctttccatagcagctacgctcacagccaaagcctggaccgactaatgaatccactcatcgaccaatacttgtactatctctcaaagactattaacggttctggacagaatcaacaaacgctaaaattcagtgtggccggacccagcaacatggctgtccagggaagaaactacatacctggacccagctaccgacaacaacgtgtctcaaccactgtgactcaaaacaacaacagcgaatttgcttggcctggagcttcttcttgggctctcaatggacgtaatagcttgatgaatcctggacctgctatggccagccacaaagaaggagaggaccgtttctttcctttgtctggatctttaatttttggcaaacaaggaactggaagagacaacgtggatgcggacaaagtcatgataaccaacgaagaagaaattaaaactactaacccggtagcaacggagtcctatggacaagtggccacaaaccaccagagtgcacaggctcgtgattctccgaagggttggcaggcgcagaccggctgggttcaaaaccaaggaatacttccgggtatggtttggcaggacagagatgtgtacctgcaaggacccatttgggccaaaattcctcacacggacggcaactttcacccttctccgctgatgggagggtttggaatgaagcacccgcctcctcagatcctcatcaaaaacacacctgtacctgcggatcctccaacggccttcaacaaggacaagctgaactctttcatcacccagtattctactggccaagtcagcgtggagatcgagtgggagctgcagaaggaaaacagcaagcgctggaacccggagatccagtacacttccaactattacaagtctaataatgttgaatttgctgttaatactgaaggtgtatatagtgaaccccgccccattggcaccagatacctgactcgtaatctgtaa

SEQ ID NO: 3626 - DNA, 2232 bp, synthetic construct
  source 1..2232: mol_type = other DNA
atggctgccgatggttatcttccagattggctcgaggacaaccttagtgaaggaattcgcgagtggtgggctttgaaacctggagcccctcaacccaaggcaaatcaacaacatcaagacaacgctcgaggtcttgtgcttccgggttacaaataccttggacccggcaacggactcgacaagggggagccggtcaacgcagcagacgcggcggccctcgagcacgacaaggcctacgaccagcagctcaaggccggagacaacccgtacctcaagtacaaccacgccgacgccgagttccaggagcggctcaaagaagatacgtcttttgggggcaacctcgggcgagcagtcttccaggccaaaaagaggcttcttgaacctcttggtctggttgaggaagcggctaagacggctcctggaaagaagaggcctgtagagcagtctcctcaggaaccggactcctccgcgggtattggcaaatcgggtgcacagcccgctaaaaagagactcaatttcggtcagactggcgacacagagtcagtcccagaccctcaaccaatcggagaacctcccgcagccccctcaggtgtgggatctcttacaatggcttcaggtggtggcgcaccagtggcagacaataacgaaggtgccgatggagtgggtagttcctcgggaaattggcattgcgattcccaatggctgggggacagagtcatcaccaccagcacccgaacctgggccctgcccacctacaacaatcacctctacaagcaaatctccaacagcacatctggaggatcttcaaatgacaacgcctacttcggctacagcaccccctgggggtattttgacttcaacagattccactgccacttctcaccacgtgactggcagcgactcatcaacaacaactggggattccggcctaagcgactcaacttcaagctcttcaacattcaggtcaaagaggttacggacaacaatggagtcaagaccatcgccaataaccttaccagcacggtccaggtcttcacggactcagactatcagctcccgtacgtgctcgggtcggctcacgagggctgcctcccgccgttcccagcggacgttttcatgattcctcagtacgggtatctgacgcttaatgatggaagccaggccgtgggtcgttcgtccttttactgcctggaatatttcccgtcgcaaatgctaagaacgggtaacaacttccagttcagctacgagtttgagaacgtacctttccatagcagctacgctcacagccaaagcctggaccgactaatgaatccactcatcgaccaatacttgtactatctctcaaagactattaacggttctggacagaatcaacaaacgctaaaattcagtgtggccggacccagcaacatggctgtccagggaagaaactacatacctggacccagctaccgacaacaacgtgtctcaaccactgtgactcaaaacaacaacagcgaatttgcttggcctggagcttcttcttgggctctcaatggacgtaatagcttgatgaatcctggacctgctatggccagccacaaagaaggagaggaccgtttctttcctttgtctggatctttaatttttggcaaacaaggaactggaagagacaacgtggatgcggacaaagtcatgataaccaacgaagaagaaattaaaactactaacccggtagcaacggagtcctatggacaagtggccacaaaccaccagagtgcacaggcttattctacggatgtgaggatgcaggcgcagaccggctgggttcaaaaccaaggaatacttccgggtatggtttggcaggacagagatgtgtacctgcaaggacccatttgggccaaaattcctcacacggacggcaactttcacccttctccgctgatgggagggtttggaatgaagcacccgcctcctcagatcctcatcaaaaacacacctgtacctgccgatcctccaacggccttcaacaaggacaagctgaactctttcatcacccagtattctactggccaagtcagcgtggagatcgagtgggagctgcagaaggaaaacagcaagcggtggaacccggagatccagtacacttccaactattacaagtctaataatgttgaatttgctgttaatactgaaggtgtatatagtgaaccccgccccattggcaccagatacctgactcgtaatctgtaa

SEQ ID NO: 3627 - DNA, 2232 bp, synthetic construct
  source 1..2232: mol_type = other DNA
atggctgccgatggttatcttccagattggctcgaggacaaccttagtgaaggaattcgcgagtggtgggctttgaaacctggagcccctcaacccaaggcaaatcaacaacatcaagacaacgctcgaggtcttgtgcttccgggttacaaataccttggacccggcaacggactcgacaagggggagccggtcaacgcagcagacgcggcggccctcgagcacgacaaggcctacgaccagcagctcaaggccggagacaacccgtacctcaagtacaaccacgccgacgccgagttccaggagcggctcaaagaagatacgtcttttgggggcaacctcgggcgagcagtcttccaggccaaaaagaggcttcttgaacctcttggtctggttgaggaagcggctaagacggctcctggaaagaagaggcctgtagagcagtctcctcaggaaccggactcctccgcgggtattggcaaatcgggtgcacagcccgctaaaaagagactcaatttcggtcagactggcgacacagagtcagtcccagaccctcaaccaatcggagaacctcccgcagccccctcaggtgtgggatctcttacaatggcttcaggtggtggcgcaccagtggcagacaataacgaaggtgccgatggagtgggtagttcctcgggaaattggcattgcgattcccaatggctgggggacagagtcatcaccaccagcacccgaacctgggccctgcccacctacaacaatcacctctacaagcaaatctccaacagcacatctggaggatcttcaaatgacaacgcctacttcggctacagcaccccctgggggtattttgacttcaacagattccactgccacttctcaccacgtgactggcagcgactcatcaacaacaactggggattccggcctaagcgactcaacttcaagctcttcaacattcaggtcaaagaggttacggacaacaatggagtcaagaccatcgccaataaccttaccagcacggtccaggtcttcacggactcagactatcagctcccgtacgtgctcgggtcggctcacgagggctgcctcccgccgttcccagcggacgttttcatgattcctcagtacgggtatctgacgcttaatgatggaagccaggccgtgggtcgttcgtccttttactgcctggaatatttcccgtcgcaaatgctaagaacgggtaacaacttccagttcagctacgagtttgagaacgtacctttccatagcagctacgctcacagccaaagcctggaccgactaatgaatccactcatcgaccaatacttgtactatctctcaaagactattaacggttctggacagaatcaacaaacgctaaaattcagtgtggccggacccagcaacatggctgtccagggaagaaactacatacctggacccagctaccgacaacaacgtgtctcaaccactgtgactcaaaacaacaacagcgaatttgcttggcctggagcttcttcttgggctctcaatggacgtaatagcttgatgaatcctggacctgctatggccagccacaaagaaggagaggaccgtttctttcctttgtctggatctttaatttttggcaaacaaggaactggaagagacaacgtggatgcggacaaagtcatgataaccaacgaagaagaaattaaaactactaacccggtagcaacggagtcctatggacaagtggccacaaaccaccagagtgcacagattgttatgaattcgttgaaggctcaggcgcagaccggctgggttcaaaaccaaggaatacttccgggtatggtttggcaggacagagatgtgtacctgcaaggacccatttgggccaaaattcctcacacggacggcaactttcacccttctccgctgatgggagggtttggaatgaagcacccgcctcctcagatcctcatcaaaaacacacctgtacctgccgatcctccaacggccttcaacaaggacaagctgaactctttcatcacccagtattctactggccaagtcagcgtggagatcgagtgggagctgcagaaggaaaacagcaagcggtggaacccggagatccagtacacttccaactattacaagtctaataatgttgaatttgctgttaatactgaaggtgtatatagtgaaccccgccccattggcaccagatacctgactcgtaatctgtaa

SEQ ID NO: 3628 - DNA, 2232 bp, synthetic construct
  source 1..2232: mol_type = other DNA
atggctgccgatggttatcttccagattggctcgaggacaaccttagtgaaggaattcgcgagtggtgggctttgaaacctggagcccctcaacccaaggcaaatcaacaacatcaagacaacgctcgaggtcttgtgcttccgggttacaaataccttggacccggcaacggactcgacaagggggagccggtcaacgcagcagacgcggcggccctcgagcacgacaaggcctacgaccagcagctcaaggccggagacaacccgtacctcaagtacaaccacgccgacgccgagttccaggagcggctcaaagaagatacgtcttttgggggcaacctcgggcgagcagtcttccaggccaaaaagaggcttcttgaacctcttggtctggttgaggaagcggctaagacggctcctggaaagaagaggcctgtagagcagtctcctcaggaaccggactcctccgcgggtattggcaaatcgggtgcacagcccgctaaaaagagactcaatttcggtcagactggcgacacagagtcagtcccagaccctcaaccaatcggagaacctcccgcagccccctcaggtgtgggatctcttacaatggcttcaggtggtggcgcaccagtggcagacaataacgaaggtgccgatggagtgggtagttcctcgggaaattggcattgcgattcccaatggctgggggacagagtcatcaccaccagcacccgaacctgggccctgcccacctacaacaatcacctctacaagcaaatctccaacagcacatctggaggatcttcaaatgacaacgcctacttcggctacagcaccccctgggggtattttgacttcaacagattccactgccacttctcaccacgtgactggcagcgactcatcaacaacaactggggattccggcctaagcgactcaacttcaagctcttcaacattcaggtcaaagaggttacggacaacaatggagtcaagaccatcgccaataaccttaccagcacggtccaggtcttcacggactcagactatcagctcccgtacgtgctcgggtcggctcacgagggctgcctcccgccgttcccagcggacgttttcatgattcctcagtacgggtatctgacgcttaatgatggaagccaggccgtgggtcgttcgtccttttactgcctggaatatttcccgtcgcaaatgctaagaacgggtaacaacttccagttcagctacgagtttgagaacgtacctttccatagcagctacgctcacagccaaagcctggaccgactaatgaatccactcatcgaccaatacttgtactatctctcaaagactattaacggttctggacagaatcaacaaacgctaaaattcagtgtggccggacccagcaacatggctgtccagggaagaaactacatacctggacccagctaccgacaacaacgtgtctcaaccactgtgactcaaaacaacaacagcgaatttgcttggcctggagcttcttcttgggctctcaatggacgtaatagcttgatgaatcctggacctgctatggccagccacaaagaaggagaggaccgtttctttcctttgtctggatctttaatttttggcaaacaaggaactggaagagacaacgtggatgcggacaaagtcatgataaccaacgaagaagaaattaaaactactaacccggtagcaacggagtcctatggacaagtggccacaaaccaccagagtgcacaggctcgggagagtcctcgtgggctgcaggcgcagaccggctgggttcaaaaccaaggaatacttccgggtatggtttggcaggacagagatgtgtacctgcaaggacccatttgggccaaaattcctcacacggacggcaactttcacccttctccgctgatgggagggtttggaatgaagcacccgcctcctcagatcctcatcaaaaacacacctgtacctgccgatcctccaacggccttcaacaaggacaagctgaactctttcatcacccagtattctactggccaagtcagcgtggagatcgagtgggagctgcagaaggaaaacagcaagcggtggaacccggagatccagtacacttccaactattacaagtctaataatgttgaatttgctgttaatactgaaggtgtatatagtgaaccccgccccattggcaccagatacctgactcgtaatctgtaa

SEQ ID NO: 3629 - DNA, 2232 bp, synthetic construct
  source 1..2232: mol_type = other DNA
atggctgccgatggttatcttccagattggctcgaggacaaccttagtgaaggaattcgcgagtggtgggctttgaaacctggagcccctcaacccaaggcaaatcaacaacatcaagacaacgctcgaggtcttgtgcttccgggttacaaataccttggacccggcaacggactcgacaagggggagccggtcaacgcagcagacgcggcggccctcgagcacgacaaggcctacgaccagcagctcaaggccggagacaacccgtacctcaagtacaaccacgccgacgccgagttccaggagcggctcaaagaagatacgtcttttgggggcaacctcgggcgagcagtcttccaggccaaaaagaggcttcttgaacctcttggtctggttgaggaagcggctaagacggctcctggaaagaagaggcctgtagagcagtctcctcaggaaccggactcctccgcgggtattggcaaatcgggtgcacagcccgctaaaaagagactcaatttcggtcagactggcgacacagagtcagtcccagaccctcaaccaatcggagaacctcccgcagccccctcaggtgtgggatctcttacaatggcttcaggtggtggcgcaccagtggcagacaataacgaaggtgccgatggagtgggtagttcctcgggaaattggcattgcgattcccaatggctgggggacagagtcatcaccaccagcacccgaacctgggccctgcccacctacaacaatcacctctacaagcaaatctccaacagcacatctggaggatcttcaaatgacaacgcctacttcggctacagcaccccctgggggtattttgacttcaacagattccactgccacttctcaccacgtgactggcagcgactcatcaacaacaactggggattccggcctaagcgactcaacttcaagctcttcaacattcaggtcaaagaggttacggacaacaatggagtcaagaccatcgccaataaccttaccagcacggtccaggtcttcacggactcagactatcagctcccgtacgtgctcgggtcggctcacgagggctgcctcccgccgttcccagcggacgttttcatgattcctcagtacgggtatctgacgcttaatgatggaagccaggccgtgggtcgttcgtccttttactgcctggaatatttcccgtcgcaaatgctaagaacgggtaacaacttccagttcagctacgagtttgagaacgtacctttccatagcagctacgctcacagccaaagcctggaccgactaatgaatccactcatcgaccaatacttgtactatctctcaaagactattaacggttctggacagaatcaacaaacgctaaaattcagtgtggccggacccagcaacatggctgtccagggaagaaactacatacctggacccagctaccgacaacaacgtgtctcaaccactgtgactcaaaacaacaacagcgaatttgcttggcctggagcttcttcttgggctctcaatggacgtaatagcttgatgaatcctggacctgctatggccagccacaaagaaggagaggaccgtttctttcctttgtctggatctttaatttttggcaaacaaggaactggaagagacaacgtggatgcggacaaagtcatgataaccaacgaagaagaaattaaaactactaacccggtagcaacggagtcctatggacaagtggccacaaaccaccagagtgcacaggctagttttaatgatactagggctcaggcgcagaccggctgggttcaaaaccaaggaatacttccgggtatggtttggcaggacagagatgtgtacctgcaaggacccatttgggccaaaattcctcacacggacggcaactttcacccttctccgctgatgggagggtttggaatgaagcacccgcctcctcagatcctcatcaaaaacacacctgtacctgccgatcctccaacggccttcaacaaggacaagctgaactctttcatcacccagtattctactggccaagtcagcgtggagatcgagtgggagctgcagaaggaaaacagcaagcggtggaacccggagatccagtacacttccaactattacaagtctaataatgttgaatttgctgttaatactgaaggtgtatatagtgaaccccgccccattggcaccagatacctgactcgtaatctgtaa

SEQ ID NO: 3630 - DNA, 2232 bp, synthetic construct
  source 1..2232: mol_type = other DNA
atggctgccgatggttatcttccagattggctcgaggacaaccttagtgaaggaattcgcgagtggtgggctttgaaacctggagcccctcaacccaaggcaaatcaacaacatcaagacaacgctcgaggtcttgtgcttccgggttacaaataccttggacccggcaacggactcgacaagggggagccggtcaacgcagcagacgcggcggccctcgagcacgacaaggcctacgaccagcagctcaaggccggagacaacccgtacctcaagtacaaccacgccgacgccgagttccaggagcggctcaaagaagatacgtcttttgggggcaacctcgggcgagcagtcttccaggccaaaaagaggcttcttgaacctcttggtctggttgaggaagcggctaagacggctcctggaaagaagaggcctgtagagcagtctcctcaggaaccggactcctccgcgggtattggcaaatcgggtgcacagcccgctaaaaagagactcaatttcggtcagactggcgacacagagtcagtcccagaccctcaaccaatcggagaacctcccgcagccccctcaggtgtgggatctcttacaatggcttcaggtggtggcgcaccagtggcagacaataacgaaggtgccgatggagtgggtagttcctcgggaaattggcattgcgattcccaatggctgggggacagagtcatcaccaccagcacccgaacctgggccctgcccacctacaacaatcacctctacaagcaaatctccaacagcacatctggaggatcttcaaatgacaacgcctacttcggctacagcaccccctgggggtattttgacttcaacagattccactgccacttctcaccacgtgactggcagcgactcatcaacaacaactggggattccggcctaagcgactcaacttcaagctcttcaacattcaggtcaaagaggttacggacaacaatggagtcaagaccatcgccaataaccttaccagcacggtccaggtcttcacggactcagactatcagctcccgtacgtgctcgggtcggctcacgagggctgcctcccgccgttcccagcggacgttttcatgattcctcagtacgggtatctgacgcttaatgatggaagccaggccgtgggtcgttcgtccttttactgcctggaatatttcccgtcgcaaatgctaagaacgggtaacaacttccagttcagctacgagtttgagaacgtacctttccatagcagctacgctcacagccaaagcctggaccgactaatgaatccactcatcgaccaatacttgtactatctctcaaagactattaacggttctggacagaatcaacaaacgctaaaattcagtgtggccggacccagcaacatggctgtccagggaagaaactacatacctggacccagctaccgacaacaacgtgtctcaaccactgtgactcaaaacaacaacagcgaatttgcttggcctggagcttcttcttgggctctcaatggacgtaatagcttgatgaatcctggacctgctatggccagccacaaagaaggagaggaccgtttctttcctttgtctggatctttaatttttggcaaacaaggaactggaagagacaacgtggatgcggacaaagtcatgataaccaacgaagaagaaattaaaactactaacccggtagcaacggagtcctatggacaagtggccacaaaccaccagagtggtggtacgttggccgtcgtgtcgcttgctcaggcgcagaccggctgggttcaaaaccaaggaatacttccgggtatggtttggcaggacagagatgtgtacctgcaaggacccatttgggccaaaattcctcacacggacggcaactttcacccttctccgctgatgggagggtttggaatgaagcacccgcctcctcagatcctcatcaaaaacacacctgtacctgccgatcctccaacggccttcaacaaggacaagctgaactctttcatcacccagtattctactggccaagtcagcgtggagatcgagtgggagctgcagaaggaaaacagcaagcggtggaacccggagatccagtacacttccaactattacaagtctaataatgttgaatttgctgttaatactgaaggtgtatatagtgaaccccgccccattggcaccagatacctgactcgtaatctgtaa

SEQ ID NO: 3631 - DNA, 2232 bp, synthetic construct
  source 1..2232: mol_type = other DNA
atggctgccgatggttatcttccagattggctcgaggacaaccttagtgaaggaattcgcgagtggtgggctttgaaacctggagcccctcaacccaaggcaaatcaacaacatcaagacaacgctcgaggtcttgtgcttccgggttacaaataccttggacccggcaacggactcgacaagggggagccggtcaacgcagcagacgcggcggccctcgagcacgacaaggcctacgaccagcagctcaaggccggagacaacccgtacctcaagtacaaccacgccgacgccgagttccaggagcggctcaaagaagatacgtcttttgggggcaacctcgggcgagcagtcttccaggccaaaaagaggcttcttgaacctcttggtctggttgaggaagcggctaagacggctcctggaaagaagaggcctgtagagcagtctcctcaggaaccggactcctccgcgggtattggcaaatcgggtgcacagcccgctaaaaagagactcaatttcggtcagactggcgacacagagtcagtcccagaccctcaaccaatcggagaacctcccgcagccccctcaggtgtgggatctcttacaatggcttcaggtggtggcgcaccagtggcagacaataacgaaggtgccgatggagtgggtagttcctcgggaaattggcattgcgattcccaatggctgggggacagagtcatcaccaccagcacccgaacctgggccctgcccacctacaacaatcacctctacaagcaaatctccaacagcacatctggaggatcttcaaatgacaacgcctacttcggctacagcaccccctgggggtattttgacttcaacagattccactgccacttctcaccacgtgactggcagcgactcatcaacaacaactggggattccggcctaagcgactcaacttcaagctcttcaacattcaggtcaaagaggttacggacaacaatggagtcaagaccatcgccaataaccttaccagcacggtccaggtcttcacggactcagactatcagctcccgtacgtgctcgggtcggctcacgagggctgcctcccgccgttcccagcggacgttttcatgattcctcagtacgggtatctgacgcttaatgatggaagccaggccgtgggtcgttcgtccttttactgcctggaatatttcccgtcgcaaatgctaagaacgggtaacaacttccagttcagctacgagtttgagaacgtacctttccatagcagctacgctcacagccaaagcctggaccgactaatgaatccactcatcgaccaatacttgtactatctctcaaagactattaacggttctggacagaatcaacaaacgctaaaattcagtgtggccggacccagcaacatggctgtccagggaagaaactacatacctggacccagctaccgacaacaacgtgtctcaaccactgtgactcaaaacaacaacagcgaatttgcttggcctggagcttcttcttgggctctcaatggacgtaatagcttgatgaatcctggacctgctatggccagccacaaagaaggagaggaccgtttctttcctttgtctggatctttaatttttggcaaacaaggaactggaagagacaacgtggatgcggacaaagtcatgataaccaacgaagaagaaattaaaactactaacccggtagcaacggagtcctatggacaagtggccacaaaccaccagagtgcacaggcttatgggttgccgaagggtcctcaggcgcagaccggctgggttcaaaaccaaggaatacttccgggtatggtttggcaggacagagatgtgtacctgcaaggacccatttgggccaaaattcctcacacggacggcaactttcacccttctccgctgatgggagggtttggaatgaagcacccgcctcctcagatcctcatcaaaaacacacctgtacctgccgatcctccaacggccttcaacaaggacaagctgaactctttcatcacccagtattctactggccaagtcagcgtggagatcgagtgggagctgcagaaggaaaacagcaagcggtggaacccggagatccagtacacttccaactattacaagtctaataatgttgaatttgctgttaatactgaaggtgtatatagtgaaccccgccccattggcaccagatacctgactcgtaatctgtaa

SEQ ID NO: 3632 - DNA, 2232 bp, synthetic construct
  source 1..2232: mol_type = other DNA
atggctgccgatggttatcttccagattggctcgaggacaaccttagtgaaggaattcgcgagtggtgggctttgaaacctggagcccctcaacccaaggcaaatcaacaacatcaagacaacgctcgaggtcttgtgcttccgggttacaaataccttggacccggcaacggactcgacaagggggagccggtcaacgcagcagacgcggcggccctcgagcacgacaaggcctacgaccagcagctcaaggccggagacaacccgtacctcaagtacaaccacgccgacgccgagttccaggagcggctcaaagaagatacgtcttttgggggcaacctcgggcgagcagtcttccaggccaaaaagaggcttcttgaacctcttggtctggttgaggaagcggctaagacggctcctggaaagaagaggcctgtagagcagtctcctcaggaaccggactcctccgcgggtattggcaaatcgggtgcacagcccgctaaaaagagactcaatttcggtcagactggcgacacagagtcagtcccagaccctcaaccaatcggagaacctcccgcagccccctcaggtgtgggatctcttacaatggcttcaggtggtggcgcaccagtggcagacaataacgaaggtgccgatggagtgggtagttcctcgggaaattggcattgcgattcccaatggctgggggacagagtcatcaccaccagcacccgaacctgggccctgcccacctacaacaatcacctctacaagcaaatctccaacagcacatctggaggatcttcaaatgacaacgcctacttcggctacagcaccccctgggggtattttgacttcaacagattccactgccacttctcaccacgtgactggcagcgactcatcaacaacaactggggattccggcctaagcgactcaacttcaagctcttcaacattcaggtcaaagaggttacggacaacaatggagtcaagaccatcgccaataaccttaccagcacggtccaggtcttcacggactcagactatcagctcccgtacgtgctcgggtcggctcacgagggctgcctcccgccgttcccagcggacgttttcatgattcctcagtacgggtatctgacgcttaatgatggaagccaggccgtgggtcgttcgtccttttactgcctggaatatttcccgtcgcaaatgctaagaacgggtaacaacttccagttcagctacgagtttgagaacgtacctttccatagcagctacgctcacagccaaagcctggaccgactaatgaatccactcatcgaccaatacttgtactatctctcaaagactattaacggttctggacagaatcaacaaacgctaaaattcagtgtggccggacccagcaacatggctgtccagggaagaaactacatacctggacccagctaccgacaacaacgtgtctcaaccactgtgactcaaaacaacaacagcgaatttgcttggcctggagcttcttcttgggctctcaatggacgtaatagcttgatgaatcctggacctgctatggccagccacaaagaaggagaggaccgtttctttcctttgtctggatctttaatttttggcaaacaaggaactggaagagacaacgtggatgcggacaaagtcatgataaccaacgaagaagaaattaaaactactaacccggtagcaacggagtcctatggacaagtggccacaaaccaccagagtgcacaggcttcgactgggacgcttcggcttcaggcgcagaccggctgggttcaaaaccaaggaatacttccgggtatggtttggcaggacagagatgtgtacctgcaaggacccatttgggccaaaattcctcacacggacggcaactttcacccttctccgctgatgggagggtttggaatgaagcacccgcctcctcagatcctcatcaaaaacacacctgtacctgccgatcctccaacggccttcaacaaggacaagctgaactctttcatcacccagtattctactggccaagtcagcgtggagatcgagtgggagctgcagaaggaaaacagcaagcggtggaacccggagatccagtacacttccaactattacaagtctaataatgttgaatttgctgttaatactgaaggtgtatatagtgaaccccgccccattggcaccagatacctgactcgtaatctgtaa

SEQ ID NO: 3633 - DNA, 2232 bp, synthetic construct
  source 1..2232: mol_type = other DNA
atggctgccgatggttatcttccagattggctcgaggacaaccttagtgaaggaattcgcgagtggtgggctttgaaacctggagcccctcaacccaaggcaaatcaacaacatcaagacaacgctcgaggtcttgtgcttccgggttacaaataccttggacccggcaacggactcgacaagggggagccggtcaacgcagcagacgcggcggccctcgagcacgacaaggcctacgaccagcagctcaaggccggagacaacccgtacctcaagtacaaccacgccgacgccgagttccaggagcggctcaaagaagatacgtcttttgggggcaacctcgggcgagcagtcttccaggccaaaaagaggcttcttgaacctcttggtctggttgaggaagcggctaagacggctcctggaaagaagaggcctgtagagcagtctcctcaggaaccggactcctccgcgggtattggcaaatcgggtgcacagcccgctaaaaagagactcaatttcggtcagactggcgacacagagtcagtcccagaccctcaaccaatcggagaacctcccgcagccccctcaggtgtgggatctcttacaatggcttcaggtggtggcgcaccagtggcagacaataacgaaggtgccgatggagtgggtagttcctcgggaaattggcattgcgattcccaatggctgggggacagagtcatcaccaccagcacccgaacctgggccctgcccacctacaacaatcacctctacaagcaaatctccaacagcacatctggaggatcttcaaatgacaacgcctacttcggctacagcaccccctgggggtattttgacttcaacagattccactgccacttctcaccacgtgactggcagcgactcatcaacaacaactggggattccggcctaagcgactcaacttcaagctcttcaacattcaggtcaaagaggttacggacaacaatggagtcaagaccatcgccaataaccttaccagcacggtccaggtcttcacggactcagactatcagctcccgtacgtgctcgggtcggctcacgagggctgcctcccgccgttcccagcggacgttttcatgattcctcagtacgggtatctgacgcttaatgatggaagccaggccgtgggtcgttcgtccttttactgcctggaatatttcccgtcgcaaatgctaagaacgggtaacaacttccagttcagctacgagtttgagaacgtacctttccatagcagctacgctcacagccaaagcctggaccgactaatgaatccactcatcgaccaatacttgtactatctctcaaagactattaacggttctggacagaatcaacaaacgctaaaattcagtgtggccggacccagcaacatggctgtccagggaagaaactacatacctggacccagctaccgacaacaacgtgtctcaaccactgtgactcaaaacaacaacagcgaatttgcttggcctggagcttcttcttgggctctcaatggacgtaatagcttgatgaatcctggacctgctatggccagccacaaagaaggagaggaccgtttctttcctttgtctggatctttaatttttggcaaacaaggaactggaagagacaacgtggatgcggacaaagtcatgataaccaacgaagaagaaattaaaactactaacccggtagcaacggagtcctatggacaagtggccacaaaccaccagagtgcgcaggcgtattcgacggatgagaggatgcaggcgcagaccggctgggttcaaaaccaaggaatacttccgggtatggtttggcaggacagagatgtgtacctgcaaggacccatttgggccaaaattcctcacacggacggcaactttcacccttctccgctgatgggagggtttggaatgaagcacccgcctcctcagatcctcatcaaaaacacacctgtacctgccgatcctccaacggccttcaacaaggacaagctgaactctttcatcacccagtattctactggccaagtcagcgtggagatcgagtgggagctgcagaaggaaaacagcaagcggtggaacccggagatccagtacacttccaactattacaagtctaataatgttgaatttgctgttaatactgaaggtgtatatagtgaaccccgccccattggcaccagatacctgactcgtaatctgtaa

SEQ ID NO: 3634 - DNA, 2232 bp, synthetic construct
  source 1..2232: mol_type = other DNA
atggctgccgatggttatcttccagattggctcgaggacaaccttagtgaaggaattcgcgagtggtgggctttgaaacctggagcccctcaacccaaggcaaatcaacaacatcaagacaacgctcgaggtcttgtgcttccgggttacaaataccttggacccggcaacggactcgacaagggggagccggtcaacgcagcagacgcggcggccctcgagcacgacaaggcctacgaccagcagctcaaggccggagacaacccgtacctcaagtacaaccacgccgacgccgagttccaggagcggctcaaagaagatacgtcttttgggggcaacctcgggcgagcagtcttccaggccaaaaagaggcttcttgaacctcttggtctggttgaggaagcggctaagacggctcctggaaagaagaggcctgtagagcagtctcctcaggaaccggactcctccgcgggtattggcaaatcgggtgcacagcccgctaaaaagagactcaatttcggtcagactggcgacacagagtcagtcccagaccctcaaccaatcggagaacctcccgcagccccctcaggtgtgggatctcttacaatggcttcaggtggtggcgcaccagtggcagacaataacgaaggtgccgatggagtgggtagttcctcgggaaattggcattgcgattcccaatggctgggggacagagtcatcaccaccagcacccgaacctgggccctgcccacctacaacaatcacctctacaagcaaatctccaacagcacatctggaggatcttcaaatgacaacgcctacttcggctacagcaccccctgggggtattttgacttcaacagattccactgccacttctcaccacgtgactggcagcgactcatcaacaacaactggggattccggcctaagcgactcaacttcaagctcttcaacattcaggtcaaagaggttacggacaacaatggagtcaagaccatcgccaataaccttaccagcacggtccaggtcttcacggactcagactatcagctcccgtacgtgctcgggtcggctcacgagggctgcctcccgccgttcccagcggacgttttcatgattcctcagtacgggtatctgacgcttaatgatggaagccaggccgtgggtcgttcgtccttttactgcctggaatatttcccgtcgcaaatgctaagaacgggtaacaacttccagttcagctacgagtttgagaacgtacctttccatagcagctacgctcacagccaaagcctggaccgactaatgaatccactcatcgaccaatacttgtactatctctcaaagactattaacggttctggacagaatcaacaaacgctaaaattcagtgtggccggacccagcaacatggctgtccagggaagaaactacatacctggacccagctaccgacaacaacgtgtctcaaccactgtgactcaaaacaacaacagcgaatttgcttggcctggagcttcttcttgggctctcaatggacgtaatagcttgatgaatcctggacctgctatggccagccacaaagaaggagaggaccgtttctttcctttgtctggatctttaatttttggcaaacaaggaactggaagagacaacgtggatgcggacaaagtcatgataaccaacgaagaagaaattaaaactactaacccggtagcaacggagtcctatggacaagtggccacaaaccaccagagtgcgcaggcgtattcgacggatgagaggaagcaggcgcagaccggctgggttcaaaaccaaggaatacttccgggtatggtttggcaggacagagatgtgtacctgcaaggacccatttgggccaaaattcctcacacggacggcaactttcacccttctccgctgatgggagggtttggaatgaagcacccgcctcctcagatcctcatcaaaaacacacctgtacctgccgatcctccaacggccttcaacaaggacaagctgaactctttcatcacccagtattctactggccaagtcagcgtggagatcgagtgggagctgcagaaggaaaacagcaagcggtggaacccggagatccagtacacttccaactattacaagtctaataatgttgaatttgctgttaatactgaaggtgtatatagtgaaccccgccccattggcaccagatacctgactcgtaatctgtaa

SEQ ID NO: 3635 - DNA, 2232 bp, synthetic construct
  source 1..2232: mol_type = other DNA
atggctgccgatggttatcttccagattggctcgaggacaaccttagtgaaggaattcgcgagtggtgggctttgaaacctggagcccctcaacccaaggcaaatcaacaacatcaagacaacgctcgaggtcttgtgcttccgggttacaaataccttggacccggcaacggactcgacaagggggagccggtcaacgcagcagacgcggcggccctcgagcacgacaaggcctacgaccagcagctcaaggccggagacaacccgtacctcaagtacaaccacgccgacgccgagttccaggagcggctcaaagaagatacgtcttttgggggcaacctcgggcgagcagtcttccaggccaaaaagaggcttcttgaacctcttggtctggttgaggaagcggctaagacggctcctggaaagaagaggcctgtagagcagtctcctcaggaaccggactcctccgcgggtattggcaaatcgggtgcacagcccgctaaaaagagactcaatttcggtcagactggcgacacagagtcagtcccagaccctcaaccaatcggagaacctcccgcagccccctcaggtgtgggatctcttacaatggcttcaggtggtggcgcaccagtggcagacaataacgaaggtgccgatggagtgggtagttcctcgggaaattggcattgcgattcccaatggctgggggacagagtcatcaccaccagcacccgaacctgggccctgcccacctacaacaatcacctctacaagcaaatctccaacagcacatctggaggatcttcaaatgacaacgcctacttcggctacagcaccccctgggggtattttgacttcaacagattccactgccacttctcaccacgtgactggcagcgactcatcaacaacaactggggattccggcctaagcgactcaacttcaagctcttcaacattcaggtcaaagaggttacggacaacaatggagtcaagaccatcgccaataaccttaccagcacggtccaggtcttcacggactcagactatcagctcccgtacgtgctcgggtcggctcacgagggctgcctcccgccgttcccagcggacgttttcatgattcctcagtacgggtatctgacgcttaatgatggaagccaggccgtgggtcgttcgtccttttactgcctggaatatttcccgtcgcaaatgctaagaacgggtaacaacttccagttcagctacgagtttgagaacgtacctttccatagcagctacgctcacagccaaagcctggaccgactaatgaatccactcatcgaccaatacttgtactatctctcaaagactattaacggttctggacagaatcaacaaacgctaaaattcagtgtggccggacccagcaacatggctgtccagggaagaaactacatacctggacccagctaccgacaacaacgtgtctcaaccactgtgactcaaaacaacaacagcgaatttgcttggcctggagcttcttcttgggctctcaatggacgtaatagcttgatgaatcctggacctgctatggccagccacaaagaaggagaggaccgtttctttcctttgtctggatctttaatttttggcaaacaaggaactggaagagacaacgtggatgcggacaaagtcatgataaccaacgaagaagaaattaaaactactaacccggtagcaacggagtcctatggacaagtggccacaaaccaccagagtgcacaggcttatgtttcgtctgttaagatgcaggcgcagaccggctgggttcaaaaccaaggaatacttccgggtatggtttggcaggacagagatgtgtacctgcaaggacccatttgggccaaaattcctcacacggacggcaactttcacccttctccgctgatgggagggtttggaatgaagcacccgcctcctcagatcctcatcaaaaacacacctgtacctgccgatcctccaacggccttcaacaaggacaagctgaactctttcatcacccagtattctactggccaagtcagcgtggagatcgagtgggagctgcagaaggaaaacagcaagcggtggaacccggagatccagtacacttccaactattacaagtctaataatgttgaatttgctgttaatactgaaggtgtatatagtgaaccccgccccattggcaccagatacctgactcgtaatctgtaa

SEQ ID NO: 3636 - protein, 743 aa, synthetic construct
MAADGYLPDWLEDNLSEGIREWWALKPGAPQPKANQQHQDNARGLVLPGYKYLGPGNGLDKGEPVNAADAAALEHDKAYDQQLKAGDNPYLKYNHADAEFQERLKEDTSFGGNLGRAVFQAKKRLLEPLGLVEEAAKTAPGKKRPVEQSPQEPDSSAGIGKSGAQPAKKRLNFGQTGDTESVPDPQPIGEPPAAPSGVGSLTMASGGGAPVADNNEGADGVGSSSGNWHCDSQWLGDRVITTSTRTWALPTYNNHLYKQISNSTSGGSSNDNAYFGYSTPWGYFDFNRFHCHFSPRDWQRLINNNWGFRPKRLNFKLFNIQVKEVTDNNGVKTIANNLTSTVQVFTDSDYQLPYVLGSAHEGCLPPFPADVFMIPQYGYLTLNDGSQAVGRSSFYCLEYFPSQMLRTGNNFQFSYEFENVPFHSSYAHSQSLDRLMNPLIDQYLYYLSKTINGSGQNQQTLKFSVAGPSNMAVQGRNYIPGPSYRQQRVSTTVTQNNNSEFAWPGASSWALNGRNSLMNPGPAMASHKEGEDRFFPLSGSLIFGKQGTGRDNVDADKVMITNEEEIKTTNPVATESYGQVATNHQSPLNGAVHLYAQAQTGWVQNQGILPGMVWQDRDVYLQGPIWAKIPHTDGNFHPSPLMGGFGMKHPPPQILIKNTPVPADPPTAFNKDKLNSFITQYSTGQVSVEIEWELQKENSKRWNPEIQYTSNYYKSNNVEFAVNTEGVYSEPRPIGTRYLTRNL

SEQ ID NO: 3637 - protein, 743 aa, synthetic construct
MAADGYLPDWLEDNLSEGIREWWALKPGAPQPKANQQHQDNARGLVLPGYKYLGPGNGLDKGEPVNAADAAALEHDKAYDQQLKAGDNPYLKYNHADAEFQERLKEDTSFGGNLGRAVFQAKKRLLEPLGLVEEAAKTAPGKKRPVEQSPQEPDSSAGIGKSGAQPAKKRLNFGQTGDTESVPDPQPIGEPPAAPSGVGSLTMASGGGAPVADNNEGADGVGSSSGNWHCDSQWLGDRVITTSTRTWALPTYNNHLYKQISNSTSGGSSNDNAYFGYSTPWGYFDFNRFHCHFSPRDWQRLINNNWGFRPKRLNFKLFNIQVKEVTDNNGVKTIANNLTSTVQVFTDSDYQLPYVLGSAHEGCLPPFPADVFMIPQYGYLTLNDGSQAVGRSSFYCLEYFPSQMLRTGNNFQFSYEFENVPFHSSYAHSQSLDRLMNPLIDQYLYYLSKTINGSGQNQQTLKFSVAGPSNMAVQGRNYIPGPSYRQQRVSTTVTQNNNSEFAWPGASSWALNGRNSLMNPGPAMASHKEGEDRFFPLSGSLIFGKQGTGRDNVDADKVMITNEEEIKTTNPVATESYGQVATNHQSAQARDSPKGWQAQTGWVQNQGILPGMVWQDRDVYLQGPIWAKIPHTDGNFHPSPLMGGFGMKHPPPQILIKNTPVPADPPTAFNKDKLNSFITQYSTGQVSVEIEWELQKENSKRWNPEIQYTSNYYKSNNVEFAVNTEGVYSEPRPIGTRYLTRNL

SEQ ID NO: 3638 - protein, 743 aa, synthetic construct
MAADGYLPDWLEDNLSEGIREWWALKPGAPQPKANQQHQDNARGLVLPGYKYLGPGNGLDKGEPVNAADAAALEHDKAYDQQLKAGDNPYLKYNHADAEFQERLKEDTSFGGNLGRAVFQAKKRLLEPLGLVEEAAKTAPGKKRPVEQSPQEPDSSAGIGKSGAQPAKKRLNFGQTGDTESVPDPQPIGEPPAAPSGVGSLTMASGGGAPVADNNEGADGVGSSSGNWHCDSQWLGDRVITTSTRTWALPTYNNHLYKQISNSTSGGSSNDNAYFGYSTPWGYFDFNRFHCHFSPRDWQRLINNNWGFRPKRLNFKLFNIQVKEVTDNNGVKTIANNLTSTVQVFTDSDYQLPYVLGSAHEGCLPPFPADVFMIPQYGYLTLNDGSQAVGRSSFYCLEYFPSQMLRTGNNFQFSYEFENVPFHSSYAHSQSLDRLMNPLIDQYLYYLSKTINGSGQNQQTLKFSVAGPSNMAVQGRNYIPGPSYRQQRVSTTVTQNNNSEFAWPGASSWALNGRNSLMNPGPAMASHKEGEDRFFPLSGSLIFGKQGTGRDNVDADKVMITNEEEIKTTNPVATESYGQVATNHQSAQAYSTDVRMQAQTGWVQNQGILPGMVWQDRDVYLQGPIWAKIPHTDGNFHPSPLMGGFGMKHPPPQILIKNTPVPADPPTAFNKDKLNSFITQYSTGQVSVEIEWELQKENSKRWNPEIQYTSNYYKSNNVEFAVNTEGVYSEPRPIGTRYLTRNL

SEQ ID NO: 3639 - protein, 743 aa, synthetic construct
MAADGYLPDWLEDNLSEGIREWWALKPGAPQPKANQQHQDNARGLVLPGYKYLGPGNGLDKGEPVNAADAAALEHDKAYDQQLKAGDNPYLKYNHADAEFQERLKEDTSFGGNLGRAVFQAKKRLLEPLGLVEEAAKTAPGKKRPVEQSPQEPDSSAGIGKSGAQPAKKRLNFGQTGDTESVPDPQPIGEPPAAPSGVGSLTMASGGGAPVADNNEGADGVGSSSGNWHCDSQWLGDRVITTSTRTWALPTYNNHLYKQISNSTSGGSSNDNAYFGYSTPWGYFDFNRFHCHFSPRDWQRLINNNWGFRPKRLNFKLFNIQVKEVTDNNGVKTIANNLTSTVQVFTDSDYQLPYVLGSAHEGCLPPFPADVFMIPQYGYLTLNDGSQAVGRSSFYCLEYFPSQMLRTGNNFQFSYEFENVPFHSSYAHSQSLDRLMNPLIDQYLYYLSKTINGSGQNQQTLKFSVAGPSNMAVQGRNYIPGPSYRQQRVSTTVTQNNNSEFAWPGASSWALNGRNSLMNPGPAMASHKEGEDRFFPLSGSLIFGKQGTGRDNVDADKVMITNEEEIKTTNPVATESYGQVATNHQSAQIVMNSLKAQAQTGWVQNQGILPGMVWQDRDVYLQGPIWAKIPHTDGNFHPSPLMGGFGMKHPPPQILIKNTPVPADPPTAFNKDKLNSFITQYSTGQVSVEIEWELQKENSKRWNPEIQYTSNYYKSNNVEFAVNTEGVYSEPRPIGTRYLTRNL

SEQ ID NO: 3640 - protein, 743 aa, synthetic construct
MAADGYLPDWLEDNLSEGIREWWALKPGAPQPKANQQHQDNARGLVLPGYKYLGPGNGLDKGEPVNAADAAALEHDKAYDQQLKAGDNPYLKYNHADAEFQERLKEDTSFGGNLGRAVFQAKKRLLEPLGLVEEAAKTAPGKKRPVEQSPQEPDSSAGIGKSGAQPAKKRLNFGQTGDTESVPDPQPIGEPPAAPSGVGSLTMASGGGAPVADNNEGADGVGSSSGNWHCDSQWLGDRVITTSTRTWALPTYNNHLYKQISNSTSGGSSNDNAYFGYSTPWGYFDFNRFHCHFSPRDWQRLINNNWGFRPKRLNFKLFNIQVKEVTDNNGVKTIANNLTSTVQVFTDSDYQLPYVLGSAHEGCLPPFPADVFMIPQYGYLTLNDGSQAVGRSSFYCLEYFPSQMLRTGNNFQFSYEFENVPFHSSYAHSQSLDRLMNPLIDQYLYYLSKTINGSGQNQQTLKFSVAGPSNMAVQGRNYIPGPSYRQQRVSTTVTQNNNSEFAWPGASSWALNGRNSLMNPGPAMASHKEGEDRFFPLSGSLIFGKQGTGRDNVDADKVMITNEEEIKTTNPVATESYGQVATNHQSAQARESPRGLQAQTGWVQNQGILPGMVWQDRDVYLQGPIWAKIPHTDGNFHPSPLMGGFGMKHPPPQILIKNTPVPADPPTAFNKDKLNSFITQYSTGQVSVEIEWELQKENSKRWNPEIQYTSNYYKSNNVEFAVNTEGVYSEPRPIGTRYLTRNL

SEQ ID NO: 3641 - protein, 743 aa, synthetic construct
MAADGYLPDWLEDNLSEGIREWWALKPGAPQPKANQQHQDNARGLVLPGYKYLGPGNGLDKGEPVNAADAAALEHDKAYDQQLKAGDNPYLKYNHADAEFQERLKEDTSFGGNLGRAVFQAKKRLLEPLGLVEEAAKTAPGKKRPVEQSPQEPDSSAGIGKSGAQPAKKRLNFGQTGDTESVPDPQPIGEPPAAPSGVGSLTMASGGGAPVADNNEGADGVGSSSGNWHCDSQWLGDRVITTSTRTWALPTYNNHLYKQISNSTSGGSSNDNAYFGYSTPWGYFDFNRFHCHFSPRDWQRLINNNWGFRPKRLNFKLFNIQVKEVTDNNGVKTIANNLTSTVQVFTDSDYQLPYVLGSAHEGCLPPFPADVFMIPQYGYLTLNDGSQAVGRSSFYCLEYFPSQMLRTGNNFQFSYEFENVPFHSSYAHSQSLDRLMNPLIDQYLYYLSKTINGSGQNQQTLKFSVAGPSNMAVQGRNYIPGPSYRQQRVSTTVTQNNNSEFAWPGASSWALNGRNSLMNPGPAMASHKEGEDRFFPLSGSLIFGKQGTGRDNVDADKVMITNEEEIKTTNPVATESYGQVATNHQSAQASFNDTRAQAQTGWVQNQGILPGMVWQDRDVYLQGPIWAKIPHTDGNFHPSPLMGGFGMKHPPPQILIKNTPVPADPPTAFNKDKLNSFITQYSTGQVSVEIEWELQKENSKRWNPEIQYTSNYYKSNNVEFAVNTEGVYSEPRPIGTRYLTRNL

SEQ ID NO: 3642 - protein, 743 aa, synthetic construct
MAADGYLPDWLEDNLSEGIREWWALKPGAPQPKANQQHQDNARGLVLPGYKYLGPGNGLDKGEPVNAADAAALEHDKAYDQQLKAGDNPYLKYNHADAEFQERLKEDTSFGGNLGRAVFQAKKRLLEPLGLVEEAAKTAPGKKRPVEQSPQEPDSSAGIGKSGAQPAKKRLNFGQTGDTESVPDPQPIGEPPAAPSGVGSLTMASGGGAPVADNNEGADGVGSSSGNWHCDSQWLGDRVITTSTRTWALPTYNNHLYKQISNSTSGGSSNDNAYFGYSTPWGYFDFNRFHCHFSPRDWQRLINNNWGFRPKRLNFKLFNIQVKEVTDNNGVKTIANNLTSTVQVFTDSDYQLPYVLGSAHEGCLPPFPADVFMIPQYGYLTLNDGSQAVGRSSFYCLEYFPSQMLRTGNNFQFSYEFENVPFHSSYAHSQSLDRLMNPLIDQYLYYLSKTINGSGQNQQTLKFSVAGPSNMAVQGRNYIPGPSYRQQRVSTTVTQNNNSEFAWPGASSWALNGRNSLMNPGPAMASHKEGEDRFFPLSGSLIFGKQGTGRDNVDADKVMITNEEEIKTTNPVATESYGQVATNHQSGGTLAVVSLAQAQTGWVQNQGILPGMVWQDRDVYLQGPIWAKIPHTDGNFHPSPLMGGFGMKHPPPQILIKNTPVPADPPTAFNKDKLNSFITQYSTGQVSVEIEWELQKENSKRWNPEIQYTSNYYKSNNVEFAVNTEGVYSEPRPIGTRYLTRNL

SEQ ID NO: 3643 - protein, 743 aa, synthetic construct
MAADGYLPDWLEDNLSEGIREWWALKPGAPQPKANQQHQDNARGLVLPGYKYLGPGNGLDKGEPVNAADAAALEHDKAYDQQLKAGDNPYLKYNHADAEFQERLKEDTSFGGNLGRAVFQAKKRLLEPLGLVEEAAKTAPGKKRPVEQSPQEPDSSAGIGKSGAQPAKKRLNFGQTGDTESVPDPQPIGEPPAAPSGVGSLTMASGGGAPVADNNEGADGVGSSSGNWHCDSQWLGDRVITTSTRTWALPTYNNHLYKQISNSTSGGSSNDNAYFGYSTPWGYFDFNRFHCHFSPRDWQRLINNNWGFRPKRLNFKLFNIQVKEVTDNNGVKTIANNLTSTVQVFTDSDYQLPYVLGSAHEGCLPPFPADVFMIPQYGYLTLNDGSQAVGRSSFYCLEYFPSQMLRTGNNFQFSYEFENVPFHSSYAHSQSLDRLMNPLIDQYLYYLSKTINGSGQNQQTLKFSVAGPSNMAVQGRNYIPGPSYRQQRVSTTVTQNNNSEFAWPGASSWALNGRNSLMNPGPAMASHKEGEDRFFPLSGSLIFGKQGTGRDNVDADKVMITNEEEIKTTNPVATESYGQVATNHQSAQAYGLPKGPQAQTGWVQNQGILPGMVWQDRDVYLQGPIWAKIPHTDGNFHPSPLMGGFGMKHPPPQILIKNTPVPADPPTAFNKDKLNSFITQYSTGQVSVEIEWELQKENSKRWNPEIQYTSNYYKSNNVEFAVNTEGVYSEPRPIGTRYLTRNL

SEQ ID NO: 3644 - protein, 743 aa, synthetic construct
MAADGYLPDWLEDNLSEGIREWWALKPGAPQPKANQQHQDNARGLVLPGYKYLGPGNGLDKGEPVNAADAAALEHDKAYDQQLKAGDNPYLKYNHADAEFQERLKEDTSFGGNLGRAVFQAKKRLLEPLGLVEEAAKTAPGKKRPVEQSPQEPDSSAGIGKSGAQPAKKRLNFGQTGDTESVPDPQPIGEPPAAPSGVGSLTMASGGGAPVADNNEGADGVGSSSGNWHCDSQWLGDRVITTSTRTWALPTYNNHLYKQISNSTSGGSSNDNAYFGYSTPWGYFDFNRFHCHFSPRDWQRLINNNWGFRPKRLNFKLFNIQVKEVTDNNGVKTIANNLTSTVQVFTDSDYQLPYVLGSAHEGCLPPFPADVFMIPQYGYLTLNDGSQAVGRSSFYCLEYFPSQMLRTGNNFQFSYEFENVPFHSSYAHSQSLDRLMNPLIDQYLYYLSKTINGSGQNQQTLKFSVAGPSNMAVQGRNYIPGPSYRQQRVSTTVTQNNNSEFAWPGASSWALNGRNSLMNPGPAMASHKEGEDRFFPLSGSLIFGKQGTGRDNVDADKVMITNEEEIKTTNPVATESYGQVATNHQSAQASTGTLRLQAQTGWVQNQGILPGMVWQDRDVYLQGPIWAKIPHTDGNFHPSPLMGGFGMKHPPPQILIKNTPVPADPPTAFNKDKLNSFITQYSTGQVSVEIEWELQKENSKRWNPEIQYTSNYYKSNNVEFAVNTEGVYSEPRPIGTRYLTRNL

SEQ ID NO: 3645 - protein, 743 aa, synthetic construct
MAADGYLPDWLEDNLSEGIREWWALKPGAPQPKANQQHQDNARGLVLPGYKYLGPGNGLDKGEPVNAADAAALEHDKAYDQQLKAGDNPYLKYNHADAEFQERLKEDTSFGGNLGRAVFQAKKRLLEPLGLVEEAAKTAPGKKRPVEQSPQEPDSSAGIGKSGAQPAKKRLNFGQTGDTESVPDPQPIGEPPAAPSGVGSLTMASGGGAPVADNNEGADGVGSSSGNWHCDSQWLGDRVITTSTRTWALPTYNNHLYKQISNSTSGGSSNDNAYFGYSTPWGYFDFNRFHCHFSPRDWQRLINNNWGFRPKRLNFKLFNIQVKEVTDNNGVKTIANNLTSTVQVFTDSDYQLPYVLGSAHEGCLPPFPADVFMIPQYGYLTLNDGSQAVGRSSFYCLEYFPSQMLRTGNNFQFSYEFENVPFHSSYAHSQSLDRLMNPLIDQYLYYLSKTINGSGQNQQTLKFSVAGPSNMAVQGRNYIPGPSYRQQRVSTTVTQNNNSEFAWPGASSWALNGRNSLMNPGPAMASHKEGEDRFFPLSGSLIFGKQGTGRDNVDADKVMITNEEEIKTTNPVATESYGQVATNHQSAQAYSTDERMQAQTGWVQNQGILPGMVWQDRDVYLQGPIWAKIPHTDGNFHPSPLMGGFGMKHPPPQILIKNTPVPADPPTAFNKDKLNSFITQYSTGQVSVEIEWELQKENSKRWNPEIQYTSNYYKSNNVEFAVNTEGVYSEPRPIGTRYLTRNL

SEQ ID NO: 3646 - protein, 743 aa, synthetic construct
MAADGYLPDWLEDNLSEGIREWWALKPGAPQPKANQQHQDNARGLVLPGYKYLGPGNGLDKGEPVNAADAAALEHDKAYDQQLKAGDNPYLKYNHADAEFQERLKEDTSFGGNLGRAVFQAKKRLLEPLGLVEEAAKTAPGKKRPVEQSPQEPDSSAGIGKSGAQPAKKRLNFGQTGDTESVPDPQPIGEPPAAPSGVGSLTMASGGGAPVADNNEGADGVGSSSGNWHCDSQWLGDRVITTSTRTWALPTYNNHLYKQISNSTSGGSSNDNAYFGYSTPWGYFDFNRFHCHFSPRDWQRLINNNWGFRPKRLNFKLFNIQVKEVTDNNGVKTIANNLTSTVQVFTDSDYQLPYVLGSAHEGCLPPFPADVFMIPQYGYLTLNDGSQAVGRSSFYCLEYFPSQMLRTGNNFQFSYEFENVPFHSSYAHSQSLDRLMNPLIDQYLYYLSKTINGSGQNQQTLKFSVAGPSNMAVQGRNYIPGPSYRQQRVSTTVTQNNNSEFAWPGASSWALNGRNSLMNPGPAMASHKEGEDRFFPLSGSLIFGKQGTGRDNVDADKVMITNEEEIKTTNPVATESYGQVATNHQSAQAYSTDERKQAQTGWVQNQGILPGMVWQDRDVYLQGPIWAKIPHTDGNFHPSPLMGGFGMKHPPPQILIKNTPVPADPPTAFNKDKLNSFITQYSTGQVSVEIEWELQKENSKRWNPEIQYTSNYYKSNNVEFAVNTEGVYSEPRPIGTRYLTRNL

SEQ ID NO: 3647 - protein, 743 aa, synthetic construct
MAADGYLPDWLEDNLSEGIREWWALKPGAPQPKANQQHQDNARGLVLPGYKYLGPGNGLDKGEPVNAADAAALEHDKAYDQQLKAGDNPYLKYNHADAEFQERLKEDTSFGGNLGRAVFQAKKRLLEPLGLVEEAAKTAPGKKRPVEQSPQEPDSSAGIGKSGAQPAKKRLNFGQTGDTESVPDPQPIGEPPAAPSGVGSLTMASGGGAPVADNNEGADGVGSSSGNWHCDSQWLGDRVITTSTRTWALPTYNNHLYKQISNSTSGGSSNDNAYFGYSTPWGYFDFNRFHCHFSPRDWQRLINNNWGFRPKRLNFKLFNIQVKEVTDNNGVKTIANNLTSTVQVFTDSDYQLPYVLGSAHEGCLPPFPADVFMIPQYGYLTLNDGSQAVGRSSFYCLEYFPSQMLRTGNNFQFSYEFENVPFHSSYAHSQSLDRLMNPLIDQYLYYLSKTINGSGQNQQTLKFSVAGPSNMAVQGRNYIPGPSYRQQRVSTTVTQNNNSEFAWPGASSWALNGRNSLMNPGPAMASHKEGEDRFFPLSGSLIFGKQGTGRDNVDADKVMITNEEEIKTTNPVATESYGQVATNHQSAQAYVSSVKMQAQTGWVQNQGILPGMVWQDRDVYLQGPIWAKIPHTDGNFHPSPLMGGFGMKHPPPQILIKNTPVPADPPTAFNKDKLNSFITQYSTGQVSVEIEWELQKENSKRWNPEIQYTSNYYKSNNVEFAVNTEGVYSEPRPIGTRYLTRNL

SEQ ID NO: 3648 - protein, 9 aa, synthetic construct
PLNGAVHLY

SEQ ID NO: 3649 - protein, 7 aa, synthetic construct
RDSPKGW

SEQ ID NO: 3650 - protein, 7 aa, synthetic construct
YSTDVRM

SEQ ID NO: 3651 - protein, 7 aa, synthetic construct
IVMNSLK

SEQ ID NO: 3652 - protein, 7 aa, synthetic construct
RESPRGL

SEQ ID NO: 3653 - protein, 7 aa, synthetic construct
SFNDTRA

SEQ ID NO: 3654 - protein, 9 aa, synthetic construct
GGTLAVVSL

SEQ ID NO: 3655 - protein, 7 aa, synthetic construct
YGLPKGP

SEQ ID NO: 3656 - protein, 7 aa, synthetic construct
STGTLRL

SEQ ID NO: 3657 - protein, 7 aa, synthetic construct
YSTDERM

SEQ ID NO: 3658 - protein, 7 aa, synthetic construct
YSTDERK

SEQ ID NO: 3659 - protein, 7 aa, synthetic construct
YVSSVKM

SEQ ID NO: 3660 - DNA, 27 bp, synthetic construct
  source 1..27: mol_type = other DNA
ccgcttaatggtgccgtccatctttat

SEQ ID NO: 3661 - DNA, 23 bp, synthetic construct
  source 1..23: mol_type = other DNA
cgtgattctccgaagggttggca

SEQ ID NO: 3662 - DNA, 23 bp, synthetic construct
  source 1..23: mol_type = other DNA
tattctacggatgtgaggatgca

SEQ ID NO: 3663 - DNA, 23 bp, synthetic construct
  source 1..23: mol_type = other DNA
attgttatgaattcgttgaaggc

SEQ ID NO: 3664 - DNA, 23 bp, synthetic construct
  source 1..23: mol_type = other DNA
cgggagagtcctcgtgggctgca

SEQ ID NO: 3665 - DNA, 23 bp, synthetic construct
  source 1..23: mol_type = other DNA
agttttaatgatactagggctca

SEQ ID NO: 3666 - DNA, 27 bp, synthetic construct
  source 1..27: mol_type = other DNA
ggtggtacgttggccgtcgtgtcgctt

SEQ ID NO: 3667 - DNA, 21 bp, synthetic construct
  source 1..21: mol_type = other DNA
tatgggttgccgaagggtcct

SEQ ID NO: 3668 - DNA, 21 bp, synthetic construct
  source 1..21: mol_type = other DNA
tcgactgggacgcttcggctt

SEQ ID NO: 3669 - DNA, 21 bp, synthetic construct
  source 1..21: mol_type = other DNA
tattcgacggatgagaggatg

SEQ ID NO: 3670 - DNA, 21 bp, synthetic construct
  source 1..21: mol_type = other DNA
tattcgacggatgagaggaag

SEQ ID NO: 3671 - DNA, 21 bp, synthetic construct
  source 1..21: mol_type = other DNA
tatgtttcgtctgttaagatg

SEQ ID NO: 3672-3677 - skipped (6 entries)

SEQ ID NO: 3678 - protein, 4 aa, synthetic construct
PLNG

SEQ ID NO: 3679 - protein, 5 aa, synthetic construct
PLNGA

SEQ ID NO: 3680 - protein, 6 aa, synthetic construct
PLNGAV

SEQ ID NO: 3681 - protein, 7 aa, synthetic construct
PLNGAVH

SEQ ID NO: 3682 - protein, 8 aa, synthetic construct
PLNGAVHL

SEQ ID NO: 3683-3688 - skipped (6 entries)

SEQ ID NO: 3689 - protein, 7 aa, synthetic construct
NGAVHLY

SEQ ID NO: 3690-4542 - skipped (853 entries)

SEQ ID NO: 4543 - DNA, 11 bp, synthetic construct
  source 1..11: mol_type = other DNA
gaggagccacc

SEQ ID NO: 4544 - skipped

SEQ ID NO: 4545 - protein, 4 aa, synthetic construct
KDEL

SEQ ID NO: 4546-4672 - skipped (127 entries)

SEQ ID NO: 4673 - DNA, 23 bp, synthetic construct
  source 1..23: mol_type = other DNA
acaaacaccattgtcacactcca

SEQ ID NO: 4674 - DNA, 71 bp, synthetic construct
  source 1..71: mol_type = other DNA
acaaacaccattgtcacactccacacaaacaccattgtcacactccacacaaacaccattgtcacactcca

SEQ ID NO: 4675 - DNA, 23 bp, synthetic construct
  source 1..23: mol_type = other DNA
tccataaagtaggaaacactaca

SEQ ID NO: 4676 - DNA, 22 bp, synthetic construct
  source 1..22: mol_type = other DNA
agtgaattctaccagtgccata

SEQ ID NO: 4677 - DNA, 24 bp, synthetic construct
  source 1..24: mol_type = other DNA
agtgtgagttctaccattgccaaa

SEQ ID NO: 4678 - DNA, 23 bp, synthetic construct
  source 1..23: mol_type = other DNA
agcaaaaatgtgctagtgccaaa

SEQ ID NO: 4679 - DNA, 22 bp, synthetic construct
  source 1..22: mol_type = other DNA
atacatacttctttacattcca

SEQ ID NO: 4680 - protein, 4 aa, synthetic construct
VHLY

SEQ ID NO: 4681 - protein, 4 aa, synthetic construct
VHIY

SEQ ID NO: 4682 - protein, 4 aa, synthetic construct
VHVY

SEQ ID NO: 4683 - protein, 4 aa, synthetic construct
VHHY

SEQ ID NO: 4684 - protein, 5 aa, synthetic construct
SLNGA

SEQ ID NO: 4685 - protein, 5 aa, synthetic construct
QLNGA

SEQ ID NO: 4686 - protein, 5 aa, synthetic construct
ALNGA

SEQ ID NO: 4687 - protein, 5 aa, synthetic construct
PLNGS

SEQ ID NO: 4688 - protein, 5 aa, synthetic construct
PVNGA

SEQ ID NO: 4689 - protein, 5 aa, synthetic construct
PLNGG

SEQ ID NO: 4690 - protein, 5 aa, synthetic construct
PLNGT

SEQ ID NO: 4691 - protein, 5 aa, synthetic construct
PLDGA

SEQ ID NO: 4692 - protein, 5 aa, synthetic construct
QLNGS

SEQ ID NO: 4693 - protein, 5 aa, synthetic construct
PLNGN

SEQ ID NO: 4694 - protein, 5 aa, synthetic construct
SLDGA

SEQ ID NO: 4695 - protein, 5 aa, synthetic construct
HLNGA

SEQ ID NO: 4696 - protein, 5 aa, synthetic construct
ALNGT

SEQ ID NO: 4697 - protein, 5 aa, synthetic construct
PINGA

SEQ ID NO: 4698 - protein, 5 aa, synthetic construct
ALDGA

SEQ ID NO: 4699 - protein, 5 aa, synthetic construct
PLNCA

SEQ ID NO: 4700 - protein, 5 aa, synthetic construct
PLNGQ

SEQ ID NO: 4701 - protein, 5 aa, synthetic construct
PLDSA

SEQ ID NO: 4702 - protein, 5 aa, synthetic construct
RLDGA

SEQ ID NO: 4703 - protein, 5 aa, synthetic construct
QLNGN

SEQ ID NO: 4704 - protein, 5 aa, synthetic construct
PLNGY

SEQ ID NO: 4705 - protein, 5 aa, synthetic construct
PLDSS

SEQ ID NO: 4706 - protein, 5 aa, synthetic construct
PLNGC

SEQ ID NO: 4707 - protein, 5 aa, synthetic construct
PLYGA

SEQ ID NO: 4708 - protein, 5 aa, synthetic construct
TLNGA

SEQ ID NO: 4709 - protein, 5 aa, synthetic construct
PVDGA

SEQ ID NO: 4710 - protein, 5 aa, synthetic construct
PLKGA

SEQ ID NO: 4711 - protein, 5 aa, synthetic construct
PLNGD

SEQ ID NO: 4712 - protein, 5 aa, synthetic construct
KLDGA

SEQ ID NO: 4713 - protein, 5 aa, synthetic construct
PHNGA

SEQ ID NO: 4714 - protein, 5 aa, synthetic construct
PLNGV

SEQ ID NO: 4715 - protein, 5 aa, synthetic construct
PLNAA

SEQ ID NO: 4716 - protein, 5 aa, synthetic construct
QLNGY

SEQ ID NO: 4717 - protein, 5 aa, synthetic construct
PLDGS

SEQ ID NO: 4718 - protein, 5 aa, synthetic construct
LLNGA

SEQ ID NO: 4719 - protein, 5 aa, synthetic construct
PLNRA

SEQ ID NO: 4720 - protein, 5 aa, synthetic construct
PLIGA

SEQ ID NO: 4721 - protein, 5 aa, synthetic construct
PRNGA

SEQ ID NO: 4722 - protein, 5 aa, synthetic construct
ALNGS

SEQ ID NO: 4723 - protein, 4 aa, synthetic construct
VPLY

SEQ ID NO: 4724 - protein, 4 aa, synthetic construct
VNLY

SEQ ID NO: 4725 - protein, 4 aa, synthetic construct
VHRY

SEQ ID NO: 4726 - protein, 4 aa, synthetic construct
FHLY

SEQ ID NO: 4727 - protein, 4 aa, synthetic construct
LHLY

SEQ ID NO: 4728 - protein, 4 aa, synthetic construct
DHLY

SEQ ID NO: 4729 - protein, 4 aa, synthetic construct
VQLY

SEQ ID NO: 4730 - protein, 4 aa, synthetic construct
IHLY

SEQ ID NO: 4731 - protein, 4 aa, synthetic construct
VDLY

SEQ ID NO: 4732 - protein, 4 aa, synthetic construct
AHLY

SEQ ID NO: 4733 - protein, 4 aa, synthetic construct
VLLY

SEQ ID NO: 4734 - protein, 4 aa, synthetic construct
GHLY

SEQ ID NO: 4735 - protein, 4 aa, synthetic construct
VRLY

SEQ ID NO: 4736 - protein, 4 aa, synthetic construct
VYLY

SEQ ID NO: 4737 - protein, 4 aa, synthetic construct
AQAQ

SEQ ID NO: 4738 - protein, 4 aa, synthetic construct
SQAQ

SEQ ID NO: 4739 - protein, 4 aa, synthetic construct
AQPQ

SEQ ID NO: 4740 - protein, 4 aa, synthetic construct
AQSQ

SEQ ID NO: 4741 - protein, 4 aa, synthetic construct
AKAQ

SEQ ID NO: 4742 - protein, 4 aa, synthetic construct
AHAQ

SEQ ID NO: 4743 - protein, 4 aa, synthetic construct
AQAP

SEQ ID NO: 4744 - protein, 4 aa, synthetic construct
DQAQ

SEQ ID NO: 4745 - protein, 4 aa, synthetic construct
APAQ

SEQ ID NO: 4746 - protein, 4 aa, synthetic construct
AQAK

SEQ ID NO: 4747 - protein, 4 aa, synthetic construct
AQAH

SEQ ID NO: 4748 - protein, 4 aa, synthetic construct
AQEQ

SEQ ID NO: 4749 - protein, 4 aa, synthetic construct
ALAQ

SEQ ID NO: 4750 - protein, 4 aa, synthetic construct
ARAQ

SEQ ID NO: 4751 - protein, 4 aa, synthetic construct
TQAQ

SEQ ID NO: 4752-4753 - skipped (2 entries)

SEQ ID NO: 4754 - protein, 4 aa, synthetic construct
TLNG

SEQ ID NO: 4755 - skipped

SEQ ID NO: 4756 - protein, 4 aa, synthetic construct
SLNG

SEQ ID NO: 4757 - skipped

SEQ ID NO: 4758 - protein, 4 aa, synthetic construct
ALNG

SEQ ID NO: 4759-4761 - skipped (3 entries)

SEQ ID NO: 4762 - protein, 4 aa, synthetic construct
ALDG

SEQ ID NO: 4763 - protein, 4 aa, synthetic construct
PING

SEQ ID NO: 4764 - protein, 4 aa, synthetic construct
PLDG

SEQ ID NO: 4765 - protein, 4 aa, synthetic construct
PLDS

SEQ ID NO: 4766 - protein, 4 aa, synthetic construct
QLNG

SEQ ID NO: 4767 - protein, 4 aa, synthetic construct
SLDG

SEQ ID NO: 4768 - protein, 8 aa, synthetic construct
LDGAVHLY

SEQ ID NO: 4769 - protein, 8 aa, synthetic construct
LNGAVHLY

SEQ ID NO: 4770 - protein, 8 aa, synthetic construct
INGAVHLY

SEQ ID NO: 4771 - protein, 8 aa, synthetic construct
LDSAVHLY

SEQ ID NO: 4772 - protein, 8 aa, synthetic construct
LDSSVHLY

SEQ ID NO: 4773 - protein, 8 aa, synthetic construct
LNGGVHLY

SEQ ID NO: 4774 - protein, 8 aa, synthetic construct
LNGNVHLY

SEQ ID NO: 4775 - protein, 8 aa, synthetic construct
LNGSVHLY

SEQ ID NO: 4776 - protein, 8 aa, synthetic construct
LNGTVHLY

SEQ ID NO: 4777 - protein, 8 aa, synthetic construct
LNGAVHIY

SEQ ID NO: 4778 - protein, 8 aa, synthetic construct
LDGAVHVY

SEQ ID NO: 4779 - protein, 8 aa, synthetic construct
LNGAVHHY

SEQ ID NO: 4780 - protein, 9 aa, synthetic construct
ALDGAVHLY

SEQ ID NO: 4781 - protein, 9 aa, synthetic construct
ALNGAVHLY

SEQ ID NO: 4782 - protein, 9 aa, synthetic construct
PINGAVHLY

SEQ ID NO: 4783 - protein, 9 aa, synthetic construct
PLDGAVHLY

SEQ ID NO: 4784 - protein, 9 aa, synthetic construct
PLDSAVHLY

SEQ ID NO: 4785 - protein, 9 aa, synthetic construct
PLDSSVHLY

SEQ ID NO: 4786 - protein, 9 aa, synthetic construct
PLNGGVHLY

SEQ ID NO: 4787 - protein, 9 aa, synthetic construct
PLNGNVHLY

SEQ ID NO: 4788 - protein, 9 aa, synthetic construct
PLNGSVHLY

SEQ ID NO: 4789 - protein, 9 aa, synthetic construct
PLNGTVHLY

SEQ ID NO: 4790 - protein, 9 aa, synthetic construct
QLNGAVHLY

SEQ ID NO: 4791 - protein, 9 aa, synthetic construct
SLDGAVHLY

SEQ ID NO: 4792 - protein, 9 aa, synthetic construct
SLNGAVHLY

SEQ ID NO: 4793 - protein, 9 aa, synthetic construct
TLNGAVHLY

SEQ ID NO: 4794 - protein, 9 aa, synthetic construct
PLNGAVHIY

SEQ ID NO: 4795 - protein, 9 aa, synthetic construct
PLDGAVHVY

SEQ ID NO: 4796 - protein, 9 aa, synthetic construct
PLNGAVHHY

SEQ ID NO: 4797 - protein, 8 aa, synthetic construct
VHLYAQAQ

SEQ ID NO: 4798 - protein, 8 aa, synthetic construct
VHLYAQPQ

SEQ ID NO: 4799 - protein, 8 aa, synthetic construct
VHLYSQAQ

SEQ ID NO: 4800 - protein, 8 aa, synthetic construct
VHLYAKAQ

SEQ ID NO: 4801 - protein, 8 aa, synthetic construct
VHLYDQAQ

SEQ ID NO: 4802 - protein, 8 aa, synthetic construct
VHIYAQAQ

SEQ ID NO: 4803 - protein, 8 aa, synthetic construct
VHVYAQAQ

SEQ ID NO: 4804 - protein, 8 aa, synthetic construct
VHHYAQAQ

SEQ ID NO: 4805 - protein, 11 aa, synthetic construct
ALDGAVHLYAQ

SEQ ID NO: 4806 - protein, 11 aa, synthetic construct
ALNGAVHLYAQ

SEQ ID NO: 4807 - protein, 11 aa, synthetic construct
PINGAVHLYAQ

SEQ ID NO: 4808 - protein, 11 aa, synthetic construct
PLDGAVHLYAQ

SEQ ID NO: 4809 - protein, 11 aa, synthetic construct
PLDGAVHLYSQ

SEQ ID NO: 4810 - protein, 11 aa, synthetic construct
PLDSAVHLYAQ

SEQ ID NO: 4811 - protein, 11 aa, synthetic construct
PLDSSVHLYAQ

SEQ ID NO: 4812 - protein, 11 aa, synthetic construct
PLNGAVHLYAK

SEQ ID NO: 4813 - protein, 11 aa, synthetic construct
PLNGAVHLYAQ

SEQ ID NO: 4814 - protein, 11 aa, synthetic construct
PLNGAVHLYDQ

SEQ ID NO: 4815 - protein, 11 aa, synthetic construct
PLNGAVHLYSQ

SEQ ID NO: 4816 - protein, 11 aa, synthetic construct
PLNGGVHLYAQ

SEQ ID NO: 4817 - protein, 11 aa, synthetic construct
PLNGNVHLYAQ

SEQ ID NO: 4818 - protein, 11 aa, synthetic construct
PLNGSVHLYAQ

SEQ ID NO: 4819 - protein, 11 aa, synthetic construct
PLNGTVHLYAQ

SEQ ID NO: 4820 - protein, 11 aa, synthetic construct
QLNGAVHLYAQ

SEQ ID NO: 4821 - protein, 11 aa, synthetic construct
SLDGAVHLYAQ

SEQ ID NO: 4822 - protein, 11 aa, synthetic construct
SLNGAVHLYAQ

SEQ ID NO: 4823 - protein, 11 aa, synthetic construct
TLNGAVHLYAQ

SEQ ID NO: 4824 - protein, 11 aa, synthetic construct
PLNGAVHIYAQ

SEQ ID NO: 4825 - protein, 11 aa, synthetic construct
PLDGAVHVYAQ

SEQ ID NO: 4826 - protein, 11 aa, synthetic construct
PLNGAVHHYAQ

SEQ ID NO: 4827 - protein, 13 aa, synthetic construct
ALDGAVHLYAQAQ

SEQ ID NO: 4828 - protein, 13 aa, synthetic construct
ALNGAVHLYAQAQ

SEQ ID NO: 4829 - protein, 13 aa, synthetic construct
PINGAVHLYAQAQ

SEQ ID NO: 4830 - protein, 13 aa, synthetic construct
PLDGAVHLYAQAQ

SEQ ID NO: 4831 - protein, 13 aa, synthetic construct
PLDGAVHLYAQPQ

SEQ ID NO: 4832 - protein, 13 aa, synthetic construct
PLDGAVHLYSQAQ

SEQ ID NO: 4833 - protein, 13 aa, synthetic construct
PLDSAVHLYAQAQ

SEQ ID NO: 4834 - protein, 13 aa, synthetic construct
PLDSSVHLYAQAQ

SEQ ID NO: 4835 - protein, 13 aa, synthetic construct
PLNGAVHLYAKAQ

SEQ ID NO: 4836 - protein, 13 aa, synthetic construct
PLNGAVHLYAQAQ

SEQ ID NO: 4837 - protein, 13 aa, synthetic construct
PLNGAVHLYAQPQ

SEQ ID NO: 4838 - protein, 13 aa, synthetic construct
PLNGAVHLYDQAQ

SEQ ID NO: 4839 - protein, 13 aa, synthetic construct
PLNGAVHLYSQAQ

SEQ ID NO: 4840 - protein, 13 aa, synthetic construct
PLNGGVHLYAQAQ

SEQ ID NO: 4841 - protein, 13 aa, synthetic construct
PLNGNVHLYAQAQ

SEQ ID NO: 4842 - protein, 13 aa, synthetic construct
PLNGSVHLYAQAQ

SEQ ID NO: 4843 - protein, 13 aa, synthetic construct
PLNGTVHLYAQAQ

SEQ ID NO: 4844 - protein, 13 aa, synthetic construct
QLNGAVHLYAQAQ

SEQ ID NO: 4845 - protein, 13 aa, synthetic construct
SLDGAVHLYAQAQ

SEQ ID NO: 4846 - protein, 13 aa, synthetic construct
SLNGAVHLYAQAQ

SEQ ID NO: 4847 - protein, 13 aa, synthetic construct
TLNGAVHLYAQAQ

SEQ ID NO: 4848 - protein, 13 aa, synthetic construct
PLNGAVHIYAQAQ

SEQ ID NO: 4849 - protein, 13 aa, synthetic construct
PLDGAVHVYAQAQ

SEQ ID NO: 4850 - protein, 13 aa, synthetic construct
PLNGAVHHYAQAQ

SEQ ID NO: 4851 - protein, 6 aa, synthetic construct
TGWVQN

SEQ ID NO: 4852 - protein, 6 aa, synthetic construct
LAAVQN

SEQ ID NO: 4853 - protein, 6 aa, synthetic construct
LTPVQN

SEQ ID NO: 4854 - protein, 6 aa, synthetic construct
SAPVQN

SEQ ID NO: 4855 - protein, 6 aa, synthetic construct
SSPVQN

SEQ ID NO: 4856 - protein, 6 aa, synthetic construct
TGRVQN

SEQ ID NO: 4857 - protein, 6 aa, synthetic construct
TGWAQN

SEQ ID NO: 4858 - protein, 6 aa, synthetic construct
TGWVQS

SEQ ID NO: 4859 - protein, 6 aa, synthetic construct
TLAVQN

SEQ ID NO: 4860 - protein, 6 aa, synthetic construct
TTSVQN

SEQ ID NO: 4861 - protein, 6 aa, synthetic construct
TSPVQN

SEQ ID NO: 4862 - protein, 6 aa, synthetic construct
TALVQN

SEQ ID NO: 4863 - protein, 6 aa, synthetic construct
TAWVQN

SEQ ID NO: 4864 - protein, 6 aa, synthetic construct
TGGVQN

SEQ ID NO: 4865 - protein, 6 aa, synthetic construct
TGSVQN

SEQ ID NO: 4866 - protein, 6 aa, synthetic construct
TGWDQN

SEQ ID NO: 4867 - protein, 6 aa, synthetic construct
TVSVQN

SEQ ID NO: 4868 - protein, 6 aa, synthetic construct
VSPVQN

SEQ ID NO: 4869 - protein, 6 aa, synthetic construct
VSSVQN

SEQ ID NO: 4870 - protein, 6 aa, synthetic construct
AAPVQN

SEQ ID NO: 4871 - protein, 6 aa, synthetic construct
AGPVQN

SEQ ID NO: 4872 - protein, 6 aa, synthetic construct
ASPVQN

SEQ ID NO: 4873 - protein, 6 aa, synthetic construct
ATPVQN

SEQ ID NO: 4874 - protein, 6 aa, synthetic construct
CSPVQN

SEQ ID NO: 4875 - protein, 6 aa, synthetic construct
CTPVQN

SEQ ID NO: 4876 - protein, 6 aa, synthetic construct
IAAVQN

SEQ ID NO: 4877 - protein, 6 aa, synthetic construct
IAGVQN

SEQ ID NO: 4878 - protein, 6 aa, synthetic construct
IASVQN

SEQ ID NO: 4879 - protein, 6 aa, synthetic construct
IGGVQN

SEQ ID NO: 4880 - protein, 6 aa, synthetic construct
IGSVQN

SEQ ID NO: 4881 - protein, 6 aa, synthetic construct
ILGVQN

SEQ ID NO: 4882 - protein, 6 aa, synthetic construct
IQPVQN

SEQ ID NO: 4883 - protein, 6 aa, synthetic construct
IQSVQN

SEQ ID NO: 4884 - protein, 6 aa, synthetic construct
ISGVQN

SEQ ID NO: 4885 - protein, 6 aa, synthetic construct
ISPVQN

SEQ ID NO: 4886 - protein, 6 aa, synthetic construct
ISSVQN

SEQ ID NO: 4887 - protein, 6 aa, synthetic construct
ITPVQN

SEQ ID NO: 4888 - protein, 6 aa, synthetic construct
LAGVQN

SEQ ID NO: 4889 - protein, 6 aa, synthetic construct
LAHVQN

SEQ ID NO: 4890 - protein, 6 aa, synthetic construct
LANVQN

SEQ ID NO: 4891 - protein, 6 aa, synthetic construct
LAPVQN

SEQ ID NO: 4892 - protein, 6 aa, synthetic construct
LAPVQT

SEQ ID NO: 4893 - protein, 6 aa, synthetic construct
LAQVQN

SEQ ID NO: 4894 - protein, 6 aa, synthetic construct
LARVQN

SEQ ID NO: 4895 - protein, 6 aa, synthetic construct
LASVQN

SEQ ID NO: 4896 - protein, 6 aa, synthetic construct
LATVQN

SEQ ID NO: 4897 - protein, 6 aa, synthetic construct
LGPVQN

SEQ ID NO: 4898 - protein, 6 aa, synthetic construct
LGQVQN

SEQ ID NO: 4899 - protein, 6 aa, synthetic construct
LGSVQN

SEQ ID NO: 4900 - protein, 6 aa, synthetic construct
LHPVQN

SEQ ID NO: 4901 - protein, 6 aa, synthetic construct
LKSVQN

SEQ ID NO: 4902 - protein, 6 aa, synthetic construct
LMAVQN

SEQ ID NO: 4903 - protein, 6 aa, synthetic construct
LMGVQN

SEQ ID NO: 4904 - protein, 6 aa, synthetic construct
LMPVQN

SEQ ID NO: 4905 - protein, 6 aa, synthetic construct
LMQVQN

SEQ ID NO: 4906 - protein, 6 aa, synthetic construct
LMSVQN

SEQ ID NO: 4907 - protein, 6 aa, synthetic construct
LNPVQN

SEQ ID NO: 4908 - protein, 6 aa, synthetic construct
LQPVQN

SEQ ID NO: 4909 - protein, 6 aa, synthetic construct
LQQVQN

SEQ ID NO: 4910 - protein, 6 aa, synthetic construct
LQRVQN

SEQ ID NO: 4911 - protein, 6 aa, synthetic construct
LSHVQN

SEQ ID NO: 4912 - protein, 6 aa, synthetic construct
LSKVQN

SEQ ID NO: 4913 - protein, 6 aa, synthetic construct
LSPVQK

SEQ ID NO: 4914 - protein, 6 aa, synthetic construct
LSPVQN

SEQ ID NO: 4915 - protein, 6 aa, synthetic construct
LSQVQN

SEQ ID NO: 4916 - protein, 6 aa, synthetic construct
LSRVQN

SEQ ID NO: 4917 - protein, 6 aa, synthetic construct
LSTVQN

SEQ ID NO: 4918 - protein, 6 aa, synthetic construct
LTAVQN

SEQ ID NO: 4919 - protein, 6 aa, synthetic construct
LTNVQN

SEQ ID NO: 4920 - protein, 6 aa, synthetic construct
LTSVQN

SEQ ID NO: 4921 - protein, 6 aa, synthetic construct
MAPVQN

SEQ ID NO: 4922 - protein, 6 aa, synthetic construct
NAQVQN

SEQ ID NO: 4923 - protein, 6 aa, synthetic construct
NASVQN

SEQ ID NO: 4924 - protein, 6 aa, synthetic construct
NMQVQN

SEQ ID NO: 4925 - protein, 6 aa, synthetic construct
NSPVQN

SEQ ID NO: 4926 - protein, 6 aa, synthetic construct
NTPVQN

SEQ ID NO: 4927 - protein, 6 aa, synthetic construct
NVQVQN

SEQ ID NO: 4928 - protein, 6 aa, synthetic construct
QAPVQN

SEQ ID NO: 4929 - protein, 6 aa, synthetic construct
RAAVQN

SEQ ID NO: 4930 - protein, 6 aa, synthetic construct
RAQVQN

SEQ ID NO: 4931 - protein, 6 aa, synthetic construct
RASVQN

SEQ ID NO: 4932 - protein, 6 aa, synthetic construct
RGGVQN

SEQ ID NO: 4933 - protein, 6 aa, synthetic construct
RGSVQN

SEQ ID NO: 4934 - protein, 6 aa, synthetic construct
RIAVQN

SEQ ID NO: 4935 - protein, 6 aa, synthetic construct
RIGVQN

SEQ ID NO: 4936 - protein, 6 aa, synthetic construct
RIPVQN

SEQ ID NO: 4937 - protein, 6 aa, synthetic construct
RLGVQN

SEQ ID NO: 4938 - protein, 6 aa, synthetic construct
RLSVQN

SEQ ID NO: 4939 - protein, 6 aa, synthetic construct
RMSVQN

SEQ ID NO: 4940 - protein, 6 aa, synthetic construct
RNSVQN

SEQ ID NO: 4941 - protein, 6 aa, synthetic construct
RQPVQN

SEQ ID NO: 4942 - protein, 6 aa, synthetic construct
RSAVQN

SEQ ID NO: 4943 - protein, 6 aa, synthetic construct
RSGVQN

SEQ ID NO: 4944 - protein, 6 aa, synthetic construct
RSPVQN

SEQ ID NO: 4945 - protein, 6 aa, synthetic construct
RSQVQN

SEQ ID NO: 4946 - protein, 6 aa, synthetic construct
RSSVQN

SEQ ID NO: 4947 - protein, 6 aa, synthetic construct
RSTVQN

SEQ ID NO: 4948 - protein, 6 aa, synthetic construct
RTAVQN

SEQ ID NO: 4949 - protein, 6 aa, synthetic construct
RTGVQN

SEQ ID NO: 4950 - protein, 6 aa, synthetic construct
RTLVQN

SEQ ID NO: 4951 - protein, 6 aa, synthetic construct
RTSVQN

SEQ ID NO: 4952 - protein, 6 aa, synthetic construct
RTTVQN

SEQ ID NO: 4953 - protein, 6 aa, synthetic construct
RVEVQN

SEQ ID NO: 4954 - protein, 6 aa, synthetic construct
SAAVQN

SEQ ID NO: 4955 - protein, 6 aa, synthetic construct
SAKVQN

SEQ ID NO: 4956 - protein, 6 aa, synthetic construct
SAMVQN

SEQ ID NO: 4957 - protein, 6 aa, synthetic construct
SAQVQN

SEQ ID NO: 4958 - protein, 6 aa, synthetic construct
SGPVQN

SEQ ID NO: 4959 - protein, 6 aa, synthetic construct
SMAVQN

SEQ ID NO: 4960 - protein, 6 aa, synthetic construct
SMGVQN

SEQ ID NO: 4961 - protein, 6 aa, synthetic construct
SMQVQN

SEQ ID NO: 4962 - protein, 6 aa, synthetic construct
SMSVQN

SEQ ID NO: 4963 - protein, 6 aa, synthetic construct
STPVQN

SEQ ID NO: 4964 - protein, 6 aa, synthetic construct
SVAVQN

SEQ ID NO: 4965 - protein, 6 aa, synthetic construct
SVGVQN

SEQ ID NO: 4966 - protein, 6 aa, synthetic construct
TAAVQN

SEQ ID NO: 4967 - protein, 6 aa, synthetic construct
TAGVQN

SEQ ID NO: 4968 - protein, 6 aa, synthetic construct
TAKVQN

SEQ ID NO: 4969 - protein, 6 aa, synthetic construct
TAMVQN

SEQ ID NO: 4970 - protein, 6 aa, synthetic construct
TANVQN

SEQ ID NO: 4971 - protein, 6 aa, synthetic construct
TAPVQN

SEQ ID NO: 4972 - protein, 6 aa, synthetic construct
TAPVQT

SEQ ID NO: 4973 - protein, 6 aa, synthetic construct
TAQVQN

SEQ ID NO: 4974 - protein, 6 aa, synthetic construct
TASVQN

SEQ ID NO: 4975 - protein, 6 aa, synthetic construct
TASVQT

SEQ ID NO: 4976 - protein, 6 aa, synthetic construct
TATVQN

SEQ ID NO: 4977 - protein, 6 aa, synthetic construct
TAVVQN

SEQ ID NO: 4978 - protein, 6 aa, synthetic construct
TAWDQN

SEQ ID NO: 4979 - protein, 6 aa, synthetic construct
TAWVQH

SEQ ID NO: 4980 - protein, 6 aa, synthetic construct
TAWVQT

SEQ ID NO: 4981 - protein, 6 aa, synthetic construct
TGAVQN

SEQ ID NO: 4982 - protein, 6 aa, synthetic construct
TGCFQN

SEQ ID NO: 4983 - protein, 6 aa, synthetic construct
TGGAQN

SEQ ID NO: 4984 - protein, 6 aa, synthetic construct
TGGFQN

SEQ ID NO: 4985 - protein, 6 aa, synthetic construct
TGGVLN

SEQ ID NO: 4986 - protein, 6 aa, synthetic construct
TGGVQH

SEQ ID NO: 4987 - protein, 6 aa, synthetic construct
TGGVQK

SEQ ID NO: 4988 - protein, 6 aa, synthetic construct
TGGVQT

SEQ ID NO: 4989 - protein, 6 aa, synthetic construct
TGPVQN

SEQ ID NO: 4990 - protein, 6 aa, synthetic construct
TGSAQN

SEQ ID NO: 4991 - protein, 6 aa, synthetic construct
TGSLQN

SEQ ID NO: 4992 - protein, 6 aa, synthetic construct
TGSVQH

SEQ ID NO: 4993 - protein, 6 aa, synthetic construct
TGSVQI

SEQ ID NO: 4994 - protein, 6 aa, synthetic construct
TGSVQS

SEQ ID NO: 4995 - protein, 6 aa, synthetic construct
TGSVQT

SEQ ID NO: 4996 - protein, 6 aa, synthetic construct
TGTVQN

SEQ ID NO: 4997 - protein, 6 aa, synthetic construct
TGWEQN

SEQ ID NO: 4998 - protein, 6 aa, synthetic construct
TGWFQN

SEQ ID NO: 4999 - protein, 6 aa, synthetic construct
TGWGQT

SEQ ID NO: 5000 - protein, 6 aa, synthetic construct
TGWVPN

SEQ ID NO: 5001 - protein, 6 aa, synthetic construct
TGWVQD

SEQ ID NO: 5002 - protein, 6 aa, synthetic construct
TGWVQP

SEQ ID NO: 5003 - protein, 6 aa, synthetic construct
TGWVQT

SEQ ID NO: 5004 - protein, 6 aa, synthetic construct
TGWVRN

SEQ ID NO: 5005 - protein, 6 aa, synthetic construct
TKAVQN

SEQ ID NO: 5006 - protein, 6 aa, synthetic construct
TKPVQN

SEQ ID NO: 5007 - protein, 6 aa, synthetic construct
TKQVQN

SEQ ID NO: 5008 - protein, 6 aa, synthetic construct
TKSVQN

SEQ ID NO: 5009 - protein, 6 aa, synthetic construct
TLPVQN

SEQ ID NO: 5010 - protein, 6 aa, synthetic construct
TLQVQN

SEQ ID NO: 5011 - protein, 6 aa, synthetic construct
TMAVQN

SEQ ID NO: 5012 - protein, 6 aa, synthetic construct
TMGVQN

SEQ ID NO: 5013 - protein, 6 aa, synthetic construct
TMKVQN

SEQ ID NO: 5014 - protein, 6 aa, synthetic construct
TMNVQN

SEQ ID NO: 5015 - protein, 6 aa, synthetic construct
TMPVQN

SEQ ID NO: 5016 - protein, 6 aa, synthetic construct
TMQVQN

SEQ ID NO: 5017 - protein, 6 aa, synthetic construct
TMSVKN

SEQ ID NO: 5018 - protein, 6 aa, synthetic construct
TMSVQN

SEQ ID NO: 5019 - protein, 6 aa, synthetic construct
TMSVQT

SEQ ID NO: 5020 - protein, 6 aa, synthetic construct
TMTVQN

SEQ ID NO: 5021 - protein, 6 aa, synthetic construct
TNAVQN

SEQ ID NO: 5022 - protein, 6 aa, synthetic construct
TNQVQN

SEQ ID NO: 5023 - protein, 6 aa, synthetic construct
TNSVQN

SEQ ID NO: 5024 - protein, 6 aa, synthetic construct
TPPVQN

SEQ ID NO: 5025 - protein, 6 aa, synthetic construct
TQHVQN

SEQ ID NO: 5026 - protein, 6 aa, synthetic construct
TQKVQN

SEQ ID NO: 5027 - protein, 6 aa, synthetic construct
TQMVQN

SEQ ID NO: 5028 - protein, 6 aa, synthetic construct
TQNVQN

SEQ ID NO: 5029 - protein, 6 aa, synthetic construct
TQPVQN

SEQ ID NO: 5030 - protein, 6 aa, synthetic construct
TQQVQN

SEQ ID NO: 5031 - protein, 6 aa, synthetic construct
TQTVQN

SEQ ID NO: 5032 - protein, 6 aa, synthetic construct
TRWDQN

SEQ ID NO: 5033 - protein, 6 aa, synthetic construct
TSAVQN

SEQ ID NO: 5034 - protein, 6 aa, synthetic construct
TSGVQN

SEQ ID NO: 5035 - protein, 6 aa, synthetic construct
TSHVQN

SEQ ID NO: 5036 - protein, 6 aa, synthetic construct
TSKVQN

SEQ ID NO: 5037 - protein, 6 aa, synthetic construct
TSLVQN

SEQ ID NO: 5038 - protein, 6 aa, synthetic construct
TSMVQN

SEQ ID NO: 5039 - protein, 6 aa, synthetic construct
TSPDQN

SEQ ID NO: 5040 - protein, 6 aa, synthetic construct
TSQVQN

SEQ ID NO: 5041 - protein, 6 aa, synthetic construct
TSSVQN

SEQ ID NO: 5042 - protein, 6 aa, synthetic construct
TSSVQT

SEQ ID NO: 5043 - protein, 6 aa, synthetic construct
TSTVQN

SEQ ID NO: 5044 - protein, 6 aa, synthetic construct
TSVVQN

SEQ ID NO: 5045 - protein, 6 aa, synthetic construct
TTAVQN

SEQ ID NO: 5046 - protein, 6 aa, synthetic construct
TTGVQN

SEQ ID NO: 5047 - protein, 6 aa, synthetic construct
TTKVQN

SEQ ID NO: 5048 - protein, 6 aa, synthetic construct
TTPVQN

SEQ ID NO: 5049 - protein, 6 aa, synthetic construct
TTPVQT

SEQ ID NO: 5050 - protein, 6 aa, synthetic construct
TTQVQN

SEQ ID NO: 5051 - protein, 6 aa, synthetic construct
TTTVQN

SEQ ID NO: 5052 - protein, 6 aa, synthetic construct
TVAVQN

SEQ ID NO: 5053 - protein, 6 aa, synthetic construct
TVAVQT

SEQ ID NO: 5054 - protein, 6 aa, synthetic construct
TVGVQN

SEQ ID NO: 5055 - protein, 6 aa, synthetic construct
TVQVQN

SEQ ID NO: 5056 - protein, 6 aa, synthetic construct
TVSVKN

SEQ ID NO: 5057 - protein, 6 aa, synthetic construct
TVWVQK

SEQ ID NO: 5058 - protein, 6 aa, synthetic construct
VAAVQN

SEQ ID NO: 5059 - protein, 6 aa, synthetic construct
VAGVQN

SEQ ID NO: 5060 - protein, 6 aa, synthetic construct
VAKVQN

SEQ ID NO: 5061 - protein, 6 aa, synthetic construct
VANVQN

SEQ ID NO: 5062 - protein, 6 aa, synthetic construct
VAQVQN

SEQ ID NO: 5063 - protein, 6 aa, synthetic construct
VASVQN

SEQ ID NO: 5064 - protein, 6 aa, synthetic construct
VATVQN

SEQ ID NO: 5065 - protein, 6 aa, synthetic construct
VGGVQN

SEQ ID NO: 5066 - protein, 6 aa, synthetic construct
VGKVQN

SEQ ID NO: 5067 - protein, 6 aa, synthetic construct
VGNVQN

SEQ ID NO: 5068 - protein, 6 aa, synthetic construct
VGSVQN

SEQ ID NO: 5069 - protein, 6 aa, synthetic construct
VHPVQN

SEQ ID NO: 5070 - protein, 6 aa, synthetic construct
VKAVQN

SEQ ID NO: 5071 - protein, 6 aa, synthetic construct
VKPVQN

SEQ ID NO: 5072 - protein, 6 aa, synthetic construct
VKQVQN

SEQ ID NO: 5073 - protein, 6 aa, synthetic construct
VLPVQN

SEQ ID NO: 5074 - protein, 6 aa, synthetic construct
VLSVQN

SEQ ID NO: 5075 - protein, 6 aa, synthetic construct
VMAVQN

SEQ ID NO: 5076 - protein, 6 aa, synthetic construct
VMQVQN

SEQ ID NO: 5077 - protein, 6 aa, synthetic construct
VMSVQN

SEQ ID NO: 5078 - protein, 6 aa, synthetic construct
VNAVQN

SEQ ID NO: 5079 - protein, 6 aa, synthetic construct
VNGVQN

SEQ ID NO: 5080 - protein, 6 aa, synthetic construct
VNSVQN

SEQ ID NO: 5081 - protein, 6 aa, synthetic construct
VQAVQN

SEQ ID NO: 5082 - protein, 6 aa, synthetic construct
VQNVQN

SEQ ID NO: 5083 - protein, 6 aa, synthetic construct
VQPVQN

SEQ ID NO: 5084 - protein, 6 aa, synthetic construct
VQQVQN

SEQ ID NO: 5085 - protein, 6 aa, synthetic construct
VQSVQN

SEQ ID NO: 5086 - protein, 6 aa, synthetic construct
VQTVQN

SEQ ID NO: 5087 - protein, 6 aa, synthetic construct
VRPVQN

SEQ ID NO: 5088 - protein, 6 aa, synthetic construct
VSAVQN

SEQ ID NO: 5089 - protein, 6 aa, synthetic construct
VSGVQN

SEQ ID NO: 5090 - protein, 6 aa, synthetic construct
VSNVQN

SEQ ID NO: 5091 - protein, 6 aa, synthetic construct
VSPVQT

SEQ ID NO: 5092 - protein, 6 aa, synthetic construct
VSQVQN

SEQ ID NO: 5093 - protein, 6 aa, synthetic construct
VSRVQN

SEQ ID NO: 5094 - protein, 6 aa, synthetic construct
VSSVQK

SEQ ID NO: 5095 - protein, 6 aa, synthetic construct
VSSVQT

SEQ ID NO: 5096 - protein, 6 aa, synthetic construct
VSTVQN

SEQ ID NO: 5097 - protein, 6 aa, synthetic construct
VTAVQN

SEQ ID NO: 5098 - protein, 6 aa, synthetic construct
VTGVQN

SEQ ID NO: 5099 - protein, 6 aa, synthetic construct
VTKVQN

SEQ ID NO: 5100 - protein, 6 aa, synthetic construct
VTPVQN

SEQ ID NO: 5101 - protein, 6 aa, synthetic construct
VTSVQN

SEQ ID NO: 5102 - protein, 6 aa, synthetic construct
TGLVQN

SEQ ID NO: 5103 - protein, 6 aa, synthetic construct
TGWVKN

SEQ ID NO: 5104 - protein, 6 aa, synthetic construct
PGWVQN

SEQ ID NO: 5105 - protein, 6 aa, synthetic construct
TGWVQH

SEQ ID NO: 5106 - protein, 6 aa, synthetic construct
LSGVQN

SEQ ID NO: 5107 - protein, 6 aa, synthetic construct
LSSVQN

SEQ ID NO: 5108 - protein, 6 aa, synthetic construct
LVPVQN

SEQ ID NO: 5109 - protein, 6 aa, synthetic construct
LSPVKN

SEQ ID NO: 5110 - protein, 7 aa, synthetic construct
PLNGAVN

SEQ ID NO: 5111 - protein, 7 aa, synthetic construct
PLNGAVQ

SEQ ID NO: 5112 - protein, 7 aa, synthetic construct
PLNGAIH

SEQ ID NO: 5113 - protein, 7 aa, synthetic construct
PLNGALH

SEQ ID NO: 5114 - protein, 7 aa, synthetic construct
PLNGAVP

SEQ ID NO: 5115 - protein, 7 aa, synthetic construct
PLNGAVD

SEQ ID NO: 5116 - protein, 7 aa, synthetic construct
PLNGAAH

SEQ ID NO: 5117 - protein, 7 aa, synthetic construct
PLNGAFH

SEQ ID NO: 5118 - protein, 7 aa, synthetic construct
PLNGADH

SEQ ID NO: 5119 - protein, 7 aa, synthetic construct
PLNGAVL

SEQ ID NO: 5120 - protein, 7 aa, synthetic construct
PLNGAGH

SEQ ID NO: 5121 - protein, 7 aa, synthetic construct
PLNGAVR

SEQ ID NO: 5122 - protein, 7 aa, synthetic construct
PLNGAVY

SEQ ID NO: 5123 - protein, 9 aa, synthetic construct
PLNGAVNLY

SEQ ID NO: 5124 - protein, 9 aa, synthetic construct
PLNGAVQLY

SEQ ID NO: 5125 - protein, 9 aa, synthetic construct
PLNGAIHLY

SEQ ID NO: 5126 - protein, 9 aa, synthetic construct
PLNGALHLY

SEQ ID NO: 5127 - protein, 9 aa, synthetic construct
PLNGAVPLY

SEQ ID NO: 5128 - protein, 9 aa, synthetic construct
PLNGAVDLY

SEQ ID NO: 5129 - protein, 9 aa, synthetic construct
PLNGAAHLY

SEQ ID NO: 5130 - protein, 9 aa, synthetic construct
PLNGAVHRY

SEQ ID NO: 5131 - protein, 9 aa, synthetic construct
PLNGAFHLY

SEQ ID NO: 5132 - protein, 9 aa, synthetic construct
PLNGADHLY

SEQ ID NO: 5133 - protein, 9 aa, synthetic construct
PLNGAVLLY

SEQ ID NO: 5134 - protein, 9 aa, synthetic construct
PLNGAGHLY

SEQ ID NO: 5135 - protein, 9 aa, synthetic construct
PLNGAVRLY

SEQ ID NO: 5136 - protein, 9 aa, synthetic construct
PLNGAVHVY

SEQ ID NO: 5137 - protein, 9 aa, synthetic construct
PLNGAVYLY

SEQ ID NO: 5138 - protein, 8 aa, synthetic construct
VHLYAHAQ

SEQ ID NO: 5139 - protein, 8 aa, synthetic construct
VNLYAQAQ

SEQ ID NO: 5140 - protein, 8 aa, synthetic construct
VQLYAQAQ

SEQ ID NO: 5141 - protein, 8 aa, synthetic construct
VHLYAQEQ

SEQ ID NO: 5142 - protein, 8 aa, synthetic construct
IHLYAQAQ

SEQ ID NO: 5143 - protein, 8 aa, synthetic construct
LHLYAQAQ

SEQ ID NO: 5144 - protein, 8 aa, synthetic construct
VPLYAQAQ

SEQ ID NO: 5145 - protein, 8 aa, synthetic construct
VHLYAQAK

SEQ ID NO: 5146 - protein, 8 aa, synthetic construct
VDLYAQAQ

SEQ ID NO: 5147 - protein, 8 aa, synthetic construct
AHLYAQAQ

SEQ ID NO: 5148 - protein, 8 aa, synthetic construct
VHRYAQAQ

SEQ ID NO: 5149 - protein, 8 aa, synthetic construct
FHLYAQAQ

SEQ ID NO: 5150 - protein, 8 aa, synthetic construct
VHLYALAQ

SEQ ID NO: 5151 - protein, 8 aa, synthetic construct
DHLYAQAQ

SEQ ID NO: 5152 - protein, 8 aa, synthetic construct
VHLYAPAQ

SEQ ID NO: 5153 - protein, 8 aa, synthetic construct
VHLYARAQ

SEQ ID NO: 5154 - protein, 8 aa, synthetic construct
VHLYAQAH

SEQ ID NO: 5155 - protein, 8 aa, synthetic construct
VLLYAQAQ

SEQ ID NO: 5156 - protein, 8 aa, synthetic construct
VHLYAQAP

SEQ ID NO: 5157 - protein, 8 aa, synthetic construct
GHLYAQAQ

SEQ ID NO: 5158 - protein, 8 aa, synthetic construct
VRLYAQAQ

SEQ ID NO: 5159 - protein, 8 aa, synthetic construct
VYLYAQAQ

SEQ ID NO: 5160 - protein, 8 aa, synthetic construct
VHLYTQAQ

SEQ ID NO: 5161 - protein, 11 aa, synthetic construct
PLNGAVHLYAH

SEQ ID NO: 5162 - protein, 11 aa, synthetic construct
PLNGAVNLYAQ

SEQ ID NO: 5163 - protein, 11 aa, synthetic construct
PLNGAVQLYAQ

SEQ ID NO: 5164 - protein, 11 aa, synthetic construct
PLNGAIHLYAQ

SEQ ID NO: 5165 - protein, 11 aa, synthetic construct
PLNGALHLYAQ

SEQ ID NO: 5166 - protein, 11 aa, synthetic construct
PLNGAVPLYAQ

SEQ ID NO: 5167 - protein, 11 aa, synthetic construct
PLNGAVDLYAQ

SEQ ID NO: 5168 - protein, 11 aa, synthetic construct
PLNGAAHLYAQ

SEQ ID NO: 5169 - protein, 11 aa, synthetic construct
PLNGAVHRYAQ

SEQ ID NO: 5170 - protein, 11 aa, synthetic construct
PLNGAFHLYAQ

SEQ ID NO: 5171 - protein, 11 aa, synthetic construct
PLNGAVHLYAL

SEQ ID NO: 5172 - protein, 11 aa, synthetic construct
PLNGADHLYAQ

SEQ ID NO: 5173 - protein, 11 aa, synthetic construct
PLNGAVHLYAP

SEQ ID NO: 5174 - protein, 11 aa, synthetic construct
PLNGAVHLYAR

SEQ ID NO: 5175 - protein, 11 aa, synthetic construct
PLNGAVLLYAQ

SEQ ID NO: 5176 - protein, 11 aa, synthetic construct
PLNGAGHLYAQ

SEQ ID NO: 5177 - protein, 11 aa, synthetic construct
PLNGAVRLYAQ

SEQ ID NO: 5178 - protein, 11 aa, synthetic construct
PLNGAVHVYAQ

SEQ ID NO: 5179 - protein, 11 aa, synthetic construct
PLNGAVYLYAQ

SEQ ID NO: 5180 - protein, 11 aa, synthetic construct
PLNGAVHLYTQ

SEQ ID NO: 5181 - protein, 13 aa, synthetic construct
PLNGAVHLYAHAQ

SEQ ID NO: 5182 - protein, 13 aa, synthetic construct
PLNGAVNLYAQAQ

SEQ ID NO: 5183 - protein, 13 aa, synthetic construct
PLNGAVQLYAQAQ

SEQ ID NO: 5184 - protein, 13 aa, synthetic construct
PLNGAVHLYAQEQ

SEQ ID NO: 5185 - protein, 13 aa, synthetic construct
PLNGAIHLYAQAQ

SEQ ID NO: 5186 - protein, 13 aa, synthetic construct
PLNGALHLYAQAQ

SEQ ID NO: 5187 - protein, 13 aa, synthetic construct
PLNGAVPLYAQAQ

SEQ ID NO: 5188 - protein, 13 aa, synthetic construct
PLNGAVHLYAQAK

SEQ ID NO: 5189 - protein, 13 aa, synthetic construct
PLNGAVDLYAQAQ

SEQ ID NO: 5190 - protein, 13 aa, synthetic construct
PLNGAAHLYAQAQ

SEQ ID NO: 5191 - protein, 13 aa, synthetic construct
PLNGAVHRYAQAQ

SEQ ID NO: 5192 - protein, 13 aa, synthetic construct
PLNGAFHLYAQAQ

SEQ ID NO: 5193 - protein, 13 aa, synthetic construct
PLNGAVHLYALAQ

SEQ ID NO: 5194 - protein, 13 aa, synthetic construct
PLNGADHLYAQAQ

SEQ ID NO: 5195 - protein, 13 aa, synthetic construct
PLNGAVHLYAPAQ

SEQ ID NO: 5196 - protein, 13 aa, synthetic construct
PLNGAVHLYARAQ

SEQ ID NO: 5197 - protein, 13 aa, synthetic construct
PLNGAVHLYAQAH

SEQ ID NO: 5198 - protein, 13 aa, synthetic construct
PLNGAVLLYAQAQ

SEQ ID NO: 5199 - protein, 13 aa, synthetic construct
PLNGAVHLYAQAP

SEQ ID NO: 5200 - protein, 13 aa, synthetic construct
PLNGAGHLYAQAQ

SEQ ID NO: 5201 - protein, 13 aa, synthetic construct
PLNGAVRLYAQAQ

SEQ ID NO: 5202 - protein, 13 aa, synthetic construct
PLNGAVHVYAQAQ

SEQ ID NO: 5203 - protein, 13 aa, synthetic construct
PLNGAVYLYAQAQ

SEQ ID NO: 5204 - protein, 13 aa, synthetic construct
PLNGAVHLYTQAQ

SEQ ID NO: 5205 - protein, 6 aa, synthetic construct
TMMVQN

SEQ ID NO: 5206 - protein, 6 aa, synthetic construct
TGGVQS

SEQ ID NO: 5207 - protein, 6 aa, synthetic construct
TGSFQN

SEQ ID NO: 5208 - protein, 6 aa, synthetic construct
RSVVQN

SEQ ID NO: 5209 - protein, 6 aa, synthetic construct
TGSVQK

SEQ ID NO: 5210 - protein, 6 aa, synthetic construct
TQLVQN

SEQ ID NO: 5211 - protein, 6 aa, synthetic construct
TGGVHN

SEQ ID NO: 5212 - protein, 6 aa, synthetic construct
RTPVQN

SEQ ID NO: 5213 - protein, 6 aa, synthetic construct
RQQVQN

SEQ ID NO: 5214 - protein, 6 aa, synthetic construct
TGSVRN

SEQ ID NO: 5215 - protein, 6 aa, synthetic construct
VQGVQN

SEQ ID NO: 5216 - protein, 6 aa, synthetic construct
PGWVQT

SEQ ID NO: 5217 - protein, 6 aa, synthetic construct
STQVQN

SEQ ID NO: 5218 - protein, 6 aa, synthetic construct
QSPVQN

SEQ ID NO: 5219 - protein, 6 aa, synthetic construct
RYSVQN

SEQ ID NO: 5220 - protein, 6 aa, synthetic construct
TQRVQN

SEQ ID NO: 5221 - protein, 6 aa, synthetic construct
SAGVQN

SEQ ID NO: 5222 - protein, 6 aa, synthetic construct
SAPVQT

SEQ ID NO: 5223 - protein, 6 aa, synthetic construct
RQSVQN

SEQ ID NO: 5224 - protein, 6 aa, synthetic construct
SQPVQN

SEQ ID NO: 5225 - protein, 6 aa, synthetic construct
VASVKN

SEQ ID NO: 5226 - protein, 6 aa, synthetic construct
TAWVRN

SEQ ID NO: 5227 - protein, 6 aa, synthetic construct
TGGGQN

SEQ ID NO: 5228 - protein, 6 aa, synthetic construct
STSVQN

SEQ ID NO: 5229 - protein, 6 aa, synthetic construct
VLGVQN

SEQ ID NO: 5230 - protein, 6 aa, synthetic construct
NQPVQN

SEQ ID NO: 5231 - protein, 6 aa, synthetic construct
LGTVQN

SEQ ID NO: 5232 - protein, 6 aa, synthetic construct
RAGVQN

SEQ ID NO: 5233 - protein, 6 aa, synthetic construct
TGGVKN

SEQ ID NO: 5234 - protein, 6 aa, synthetic construct
TAWLQN

SEQ ID NO: 5235 - protein, 6 aa, synthetic construct
TRWVQK

SEQ ID NO: 5236 - protein, 6 aa, synthetic construct
LAPVKN

SEQ ID NO: 5237 - protein, 6 aa, synthetic construct
TGSVQD

SEQ ID NO: 5238 - protein, 6 aa, synthetic construct
TGMVQN

SEQ ID NO: 5239 - protein, 6 aa, synthetic construct
LSNVQN

SEQ ID NO: 5240 - protein, 6 aa, synthetic construct
RLPVQN

SEQ ID NO: 5241 - protein, 6 aa, synthetic construct
RQGVQN

SEQ ID NO: 5242 - protein, 6 aa, synthetic construct
STPVQT

SEQ ID NO: 5243 - protein, 6 aa, synthetic construct
TTPVKN

SEQ ID NO: 5244 - protein, 6 aa, synthetic construct
RLTVQN

SEQ ID NO: 5245 - protein, 6 aa, synthetic construct
TLRVQN

SEQ ID NO: 5246 - protein, 6 aa, synthetic construct
SAFVQN

SEQ ID NO: 5247 - protein, 6 aa, synthetic construct
SVQVQN

SEQ ID NO: 5248 - protein, 6 aa, synthetic construct
LLPVQN

SEQ ID NO: 5249 - protein, 6 aa, synthetic construct
RTQVQN

SEQ ID NO: 5250 - protein, 6 aa, synthetic construct
TGSDQN

SEQ ID NO: 5251 - protein, 6 aa, synthetic construct
VASDQN

SEQ ID NO: 5252 - protein, 6 aa, synthetic construct
VSPVKN

SEQ ID NO: 5253 - protein, 6 aa, synthetic construct
LPPVQN

SEQ ID NO: 5254 - protein, 6 aa, synthetic construct
SSPVQT

SEQ ID NO: 5255 - protein, 6 aa, synthetic construct
AQPVQN

SEQ ID NO: 5256 - protein, 6 aa, synthetic construct
TPQVQN

SEQ ID NO: 5257 - protein, 6 aa, synthetic construct
TSWVQN

SEQ ID NO: 5258 - protein, 6 aa, synthetic construct
TGGDQN

SEQ ID NO: 5259 - protein, 6 aa, synthetic construct
SSPVKN

SEQ ID NO: 5260 - protein, 6 aa, synthetic construct
NTTVQN

SEQ ID NO: 5261 - protein, 6 aa, synthetic construct
TTRVQN

SEQ ID NO: 5262 - protein, 6 aa, synthetic construct
TQWVQN

SEQ ID NO: 5263 - protein, 6 aa, synthetic construct
TGSVHN

SEQ ID NO: 5264 - protein, 6 aa, synthetic construct
TGGLQN

SEQ ID NO: 5265 - protein, 6 aa, synthetic construct
TAWVQK

SEQ ID NO: 5266 - protein, 6 aa, synthetic construct
TGRVQT

SEQ ID NO: 5267 - protein, 6 aa, synthetic construct
NTQVQN

SEQ ID NO: 5268 - protein, 6 aa, synthetic construct
TGWLQN

SEQ ID NO: 5269 - protein, 6 aa, synthetic construct
TYAVQN

SEQ ID NO: 5270 - protein, 6 aa, synthetic construct
TLSVQN

SEQ ID NO: 5271 - protein, 6 aa, synthetic construct
NLPVQN

SEQ ID NO: 5272 - protein, 6 aa, synthetic construct
TSSDQN

SEQ ID NO: 5273 - protein, 6 aa, synthetic construct
ATSVQN

SEQ ID NO: 5274 - protein, 6 aa, synthetic construct
TAWFQN

SEQ ID NO: 5275 - protein, 6 aa, synthetic construct
ATQVQN

SEQ ID NO: 5276 - protein, 6 aa, synthetic construct
VSSVKN

SEQ ID NO: 5277 - protein, 6 aa, synthetic construct
TGSGQN

SEQ ID NO: 5278 - protein, 6 aa, synthetic construct
LQPVQT

SEQ ID NO: 5279 - protein, 6 aa, synthetic construct
VSAVKN

SEQ ID NO: 5280 - protein, 6 aa, synthetic construct
TQAVQN

SEQ ID NO: 5281 - protein, 6 aa, synthetic construct
TGWVQK

SEQ ID NO: 5282 - protein, 6 aa, synthetic construct
VMPVQN

SEQ ID NO: 5283 - protein, 6 aa, synthetic construct
TVSVQK

SEQ ID NO: 5284 - protein, 6 aa, synthetic construct
TAWAQN

SEQ ID NO: 5285 - protein, 6 aa, synthetic construct
NALVQN

SEQ ID NO: 5286 - protein, 6 aa, synthetic construct
RMLVQN

SEQ ID NO: 5287 - protein, 6 aa, synthetic construct
TVAVKN

SEQ ID NO: 5288 - protein, 6 aa, synthetic construct
RQLVQN

SEQ ID NO: 5289 - protein, 6 aa, synthetic construct
TLGVQN

SEQ ID NO: 5290 - protein, 6 aa, synthetic construct
LGPVQT

SEQ ID NO: 5291 - protein, 6 aa, synthetic construct
TGSVKN

SEQ ID NO: 5292 - protein, 6 aa, synthetic construct
TMSDQN

SEQ ID NO: 5293 - protein, 6 aa, synthetic construct
LASVKN

SEQ ID NO: 5294 - protein, 6 aa, synthetic construct
TGFVQN

SEQ ID NO: 5295 - protein, 6 aa, synthetic construct
SALVQN

SEQ ID NO: 5296 - protein, 6 aa, synthetic construct
TGWVKT

SEQ ID NO: 5297 - protein, 6 aa, synthetic construct
SQLVQN

SEQ ID NO: 5298 - protein, 6 aa, synthetic construct
TGWGQN

SEQ ID NO: 5299 - protein, 6 aa, synthetic construct
LSAVQN

SEQ ID NO: 5300 - protein, 6 aa, synthetic construct
TMQVQT

SEQ ID NO: 5301 - protein, 6 aa, synthetic construct
TGQVQN

SEQ ID NO: 5302 - protein, 6 aa, synthetic construct
TSPVKN

SEQ ID NO: 5303 - protein, 6 aa, synthetic construct
LSQVQT

SEQ ID NO: 5304 - protein, 6 aa, synthetic construct
TGSVLN

SEQ ID NO: 5305 - protein, 6 aa, synthetic construct
TNGVQN

SEQ ID NO: 5306 - protein, 6 aa, synthetic construct
TGWVKK

SEQ ID NO: 5307 - protein, 6 aa, synthetic construct
AAAVQN

SEQ ID NO: 5308 - protein, 6 aa, synthetic construct
SAVVQN

SEQ ID NO: 5309 - protein, 6 aa, synthetic construct
PGWVQH

SEQ ID NO: 5310 - protein, 6 aa, synthetic construct
TASDQN

SEQ ID NO: 5311 - protein, 6 aa, synthetic construct
SSRVQN

SEQ ID NO: 5312 - protein, 6 aa, synthetic construct
SPPVQN

SEQ ID NO: 5313 - protein, 6 aa, synthetic construct
VQPVQT

SEQ ID NO: 5314 - protein, 6 aa, synthetic construct
TSSVKN

SEQ ID NO: 5315 - protein, 6 aa, synthetic construct
LSPLQN

SEQ ID NO: 5316 - protein, 6 aa, synthetic construct
VSQVQK

SEQ ID NO: 5317 - protein, 6 aa, synthetic construct
LVGVQN

SEQ ID NO: 5318 - protein, 6 aa, synthetic construct
TLSVKN

SEQ ID NO: 5319 - protein, 6 aa, synthetic construct
TGWFQK

SEQ ID NO: 5320 - protein, 6 aa, synthetic construct
TPAVQN

SEQ ID NO: 5321 - protein, 6 aa, synthetic construct
TVGVKN

SEQ ID NO: 5322 - protein, 6 aa, synthetic construct
KGWDQN

SEQ ID NO: 5323 - protein, 6 aa, synthetic construct
TAWVLN

SEQ ID NO: 5324 - protein, 6 aa, synthetic construct
VPPVQN

SEQ ID NO: 5325 - protein, 6 aa, synthetic construct
ATGVQN

SEQ ID NO: 5326 - protein, 6 aa, synthetic construct
TGGVQI

SEQ ID NO: 5327 - protein, 6 aa, synthetic construct
TGWVLN

SEQ ID NO: 5328 - protein, 6 aa, synthetic construct
TAWGQN

SEQ ID NO: 5329 - protein, 6 aa, synthetic construct
TGWVHN

SEQ ID NO: 5330 - protein, 6 aa, synthetic construct
LGSVQT

SEQ ID NO: 5331 - protein, 6 aa, synthetic construct
SANVQN

SEQ ID NO: 5332 - protein, 6 aa, synthetic construct
TGGVQD

SEQ ID NO: 5333 - protein, 6 aa, synthetic construct
TMAVKN

SEQ ID NO: 5334 - protein, 6 aa, synthetic construct
TASVKN

SEQ ID NO: 5335 - protein, 6 aa, synthetic construct
SSPVQK

SEQ ID NO: 5336 - protein, 6 aa, synthetic construct
TGTVQT

SEQ ID NO: 5337 - protein, 6 aa, synthetic construct
TGWVQI

SEQ ID NO: 5338 - protein, 6 aa, synthetic construct
TVWVKN

SEQ ID NO: 5339 - protein, 6 aa, synthetic construct
SQQVQN

SEQ ID NO: 5340 - protein, 6 aa, synthetic construct
VGSVQT

SEQ ID NO: 5341 - protein, 6 aa, synthetic construct
SSMVQN

SEQ ID NO: 5342 - protein, 6 aa, synthetic construct
TSPVQK

SEQ ID NO: 5343 - protein, 6 aa, synthetic construct
AVGVQN

SEQ ID NO: 5344 - protein, 6 aa, synthetic construct
VAPVQN

SEQ ID NO: 5345 - protein, 6 aa, synthetic construct
TLPVQK

SEQ ID NO: 5346 - protein, 6 aa, synthetic construct
TGRVQH

SEQ ID NO: 5347 - protein, 6 aa, synthetic construct
TPSVQN

SEQ ID NO: 5348 - protein, 6 aa, synthetic construct
TGWVEN

SEQ ID NO: 5349 - protein, 6 aa, synthetic construct
RGWVQN

SEQ ID NO: 5350 - protein, 6 aa, synthetic construct
TGSVEN

SEQ ID NO: 5351 - protein, 6 aa, synthetic construct
SSLVQN

SEQ ID NO: 5352 - protein, 6 aa, synthetic construct
TAWVKN

SEQ ID NO: 5353 - protein, 6 aa, synthetic construct
TYSVQN

SEQ ID NO: 5354 - protein, 6 aa, synthetic construct
LAAVQT

SEQ ID NO: 5355 - protein, 6 aa, synthetic construct
TALVKN

SEQ ID NO: 5356 - protein, 6 aa, synthetic construct
TGWVQY

SEQ ID NO: 5357 - protein, 6 aa, synthetic construct
TLPVQT

SEQ ID NO: 5358 - protein, 6 aa, synthetic construct
TGLVQH

SEQ ID NO: 5359 - protein, 6 aa, synthetic construct
TPTVQN

SEQ ID NO: 5360 - protein, 6 aa, synthetic construct
TASVQK

SEQ ID NO: 5361 - protein, 6 aa, synthetic construct
TSPVQI

SEQ ID NO: 5362 - protein, 6 aa, synthetic construct
IGWVQN

SEQ ID NO: 5363 - protein, 6 aa, synthetic construct
TGWDKN

SEQ ID NO: 5364 - protein, 6 aa, synthetic construct
KSSVQN

SEQ ID NO: 5365 - protein, 6 aa, synthetic construct
TGYVQN

SEQ ID NO: 5366 - protein, 6 aa, synthetic construct
RGWVQT

SEQ ID NO: 5367 - protein, 6 aa, synthetic construct
RSLVQN

SEQ ID NO: 5368 - protein, 6 aa, synthetic construct
TGGVEN

SEQ ID NO: 5369 - protein, 6 aa, synthetic construct
TGCVRN

SEQ ID NO: 5370 - protein, 6 aa, synthetic construct
LSPVQS

SEQ ID NO: 5371 - protein, 6 aa, synthetic construct
TGPVQT

SEQ ID NO: 5372 - protein, 6 aa, synthetic construct
TVGVQK

SEQ ID NO: 5373 - protein, 6 aa, synthetic construct
TASGQN

SEQ ID NO: 5374 - protein, 6 aa, synthetic construct
SVSVQN

SEQ ID NO: 5375 - protein, 6 aa, synthetic construct
SGPVQT

SEQ ID NO: 5376 - protein, 6 aa, synthetic construct
VMSVKN

SEQ ID NO: 5377 - protein, 6 aa, synthetic construct
LGSVQK

SEQ ID NO: 5378 - protein, 6 aa, synthetic construct
TGLVLN

SEQ ID NO: 5379 - protein, 6 aa, synthetic construct
TSNVQN

SEQ ID NO: 5380 - protein, 6 aa, synthetic construct
TGWGHN

SEQ ID NO: 5381 - protein, 6 aa, synthetic construct
SQMVQN

SEQ ID NO: 5382 - protein, 6 aa, synthetic construct
TVSVHN

SEQ ID NO: 5383 - protein, 6 aa, synthetic construct
LSSVQT

SEQ ID NO: 5384 - protein, 6 aa, synthetic construct
TASVRN

SEQ ID NO: 5385 - protein, 6 aa, synthetic construct
VPAVQN

SEQ ID NO: 5386 - protein, 6 aa, synthetic construct
TGRVQK

SEQ ID NO: 5387 - protein, 6 aa, synthetic construct
AMSVQN

SEQ ID NO: 5388 - protein, 6 aa, synthetic construct
TAWVHN

SEQ ID NO: 5389 - protein, 6 aa, synthetic construct
TGLVRN

SEQ ID NO: 5390 - protein, 6 aa, synthetic construct
RTLVQT

SEQ ID NO: 5391 - protein, 6 aa, synthetic construct
TGSIQN

SEQ ID NO: 5392 - protein, 6 aa, synthetic construct
LSSVKN

SEQ ID NO: 5393 - protein, 6 aa, synthetic construct
TLQVQK

SEQ ID NO: 5394 - protein, 6 aa, synthetic construct
VGSVKN

SEQ ID NO: 5395 - protein, 6 aa, synthetic construct
LAPLQN

SEQ ID NO: 5396 - protein, 6 aa, synthetic construct
TPGVQN

SEQ ID NO: 5397 - protein, 6 aa, synthetic construct
LSAVQT

SEQ ID NO: 5398 - protein, 6 aa, synthetic construct
TGVVQN

SEQ ID NO: 5399 - protein, 6 aa, synthetic construct
VPQVQN

SEQ ID NO: 5400 - protein, 6 aa, synthetic construct
TGCVQK

SEQ ID NO: 5401 - protein, 6 aa, synthetic construct
TRWVQT

SEQ ID NO: 5402 - protein, 6 aa, synthetic construct
TGLDQN

SEQ ID NO: 5403 - protein, 6 aa, synthetic construct
VSSVHN

SEQ ID NO: 5404 - protein, 6 aa, synthetic construct
KGWVQT

SEQ ID NO: 5405 - protein, 6 aa, synthetic construct
SLPVQN

SEQ ID NO: 5406 - protein, 6 aa, synthetic construct
TTSVHN

SEQ ID NO: 5407 - protein, 6 aa, synthetic construct
TVWVQN

SEQ ID NO: 5408 - protein, 6 aa, synthetic construct
TAQLQN

SEQ ID NO: 5409 - protein, 6 aa, synthetic construct
TRWVKN

SEQ ID NO: 5410 - protein, 6 aa, synthetic construct
TAWIQN

SEQ ID NO: 5411 - protein, 6 aa, synthetic construct
LSQVKN

SEQ ID NO: 5412 - protein, 6 aa, synthetic construct
TSTVKN

SEQ ID NO: 5413 - protein, 6 aa, synthetic construct
ALPVQN

SEQ ID NO: 5414 - protein, 6 aa, synthetic construct
TSMVQT

SEQ ID NO: 5415 - protein, 6 aa, synthetic construct
TSSVQH

SEQ ID NO: 5416 - protein, 6 aa, synthetic construct
TAMVKN

SEQ ID NO: 5417 - protein, 6 aa, synthetic construct
TPWVQN

SEQ ID NO: 5418 - protein, 6 aa, synthetic construct
TPRVQN

SEQ ID NO: 5419 - protein, 6 aa, synthetic construct
SSSVQN

SEQ ID NO: 5420 - protein, 6 aa, synthetic construct
RPPVQN

SEQ ID NO: 5421 - protein, 6 aa, synthetic construct
LAGVKN

SEQ ID NO: 5422 - protein, 6 aa, synthetic construct
TSPAQN

SEQ ID NO: 5423 - protein, 6 aa, synthetic construct
RSPVQT

SEQ ID NO: 5424 - protein, 6 aa, synthetic construct
TGWVPH

SEQ ID NO: 5425 - protein, 6 aa, synthetic construct
PGWGQN

SEQ ID NO: 5426 - protein, 6 aa, synthetic construct
IPPVQN

SEQ ID NO: 5427 - protein, 6 aa, synthetic construct
TGRVKN

SEQ ID NO: 5428 - protein, 6 aa, synthetic construct
TGRLQN

SEQ ID NO: 5429 - protein, 6 aa, synthetic construct
LSSVQH

SEQ ID NO: 5430 - protein, 6 aa, synthetic construct
AGWVQT

SEQ ID NO: 5431 - protein, 6 aa, synthetic construct
TGLVQS

SEQ ID NO: 5432 - protein, 6 aa, synthetic construct
TGCVQI

SEQ ID NO: 5433 - protein, 6 aa, synthetic construct
RPGVQN

SEQ ID NO: 5434 - protein, 6 aa, synthetic construct
TAAVQH

SEQ ID NO: 5435 - protein, 6 aa, synthetic construct
TGCDQN

SEQ ID NO: 5436 - protein, 6 aa, synthetic construct
TGRVRN

SEQ ID NO: 5437 - protein, 6 aa, synthetic construct
TGRDQN

SEQ ID NO: 5438 - protein, 9 aa, synthetic construct
  VARIANT 6: note = V, I, L, A, F, D, or G
  VARIANT 7: note = H, N, Q, P, D, L, R, or Y
  VARIANT 8: note = L, H, I, R, or V
PLNGAXXXY

SEQ ID NO: 5439 - protein, 7 aa, synthetic construct
TLAVVSL

SEQ ID NO: 5440 - protein, 6 aa, synthetic construct
SGGGGS

SEQ ID NO: 5441 - protein, 25 aa, synthetic construct
GGGGSGGGGSGGGGSGGGGSGGGGS

SEQ ID NO: 5442 - protein, 5 aa, synthetic construct
GGGGS

SEQ ID NO: 5443 - protein, 10 aa, synthetic construct
GGGGSGGGGS

SEQ ID NO: 5444 - protein, 20 aa, synthetic construct
GGGGSGGGGSGGGGSGGGGS

SEQ ID NO: 5445 - protein, 30 aa, synthetic construct
GGGGSGGGGSGGGGSGGGGSGGGGSGGGGS

SEQ ID NO: 5446 - protein, 40 aa, synthetic construct
GGGGSGGGGSGGGGSGGGGSGGGGSGGGGSGGGGSGGGGS

SEQ ID NO: 5447 - protein, 40 aa, synthetic construct; identical to SEQ ID NO: 5446
  VARIANT 1..40: note = This sequence may encompass 0-8 GGGGS repeating units

We claim:

1. An adeno-associate virus (AAV) viral genome comprising a nucleic acid encoding antibody that binds to human tau, wherein the encoded antibody comprises:
(i) a heavy chain variable region (VH) comprising a heavy chain complementary determining region 1 (HCDR1) comprising the amino acid sequence of SEQ ID NO: 82, a heavy chain complementary determining region 2 (HCDR2) comprising the amino acid sequence of SEQ ID NO: 101, and a heavy chain complementary determining region 3 (HCDR3) comprising the amino acid sequence of SEQ ID NO: 119; and a light chain variable region (VL) comprising a light chain complementary determining region 1 (LCDR1) comprising the amino acid sequence of SEQ ID NO: 132, a light chain complementary determining region 2 (LCDR2) comprising the amino acid sequence of KDS, and a light chain complementary determining region 3 (LCDR3) comprising the amino acid sequence of SEQ ID NO: 1294;
(ii) a VH comprising a HCDR1 comprising the amino acid sequence of SEQ ID NO: 81, a HCDR2 comprising the amino acid sequence of SEQ ID NO: 94, and a HCDR3 comprising the amino acid sequence of SEQ ID NO: 114; and a VL comprising a LCDR1 comprising the amino acid sequence of SEQ ID NO: 127, a LCDR2 comprising the amino acid sequence of KIS, and a LCDR3 comprising the amino acid sequence of SEQ ID NO: 1286;
(iii) a VH comprising a HCDR1 comprising the amino acid sequence of SEQ ID NO: 82, a HCDR2 comprising the amino acid sequence of SEQ ID NO: 97, and a HCDR3 comprising the amino acid sequence of SEQ ID NO: 115; and a VL comprising a LCDR1 comprising the amino acid sequence of SEQ ID NO: 127, a LCDR2 comprising the amino acid sequence of KIS, and a LCDR3 comprising the amino acid sequence of SEQ ID NO 1289;
(iv) a VH comprising a HCDR1 comprising the amino acid sequence of SEQ ID NO: 80, a HCDR2 comprising the amino acid sequence of SEQ ID NO: 95, and a HCDR3 comprising the amino acid sequence of SEQ ID NO: 112; and a VL comprising a LCDR1 comprising the amino acid sequence of SEQ ID NO: 129, a LCDR2 comprising the amino acid sequence of DVS, and a LCDR3 comprising the amino acid sequence of SEQ ID NO: 1287;
(v) a VH comprising a HCDR1 comprising the amino acid sequence of SEQ ID NO: 79, a HCDR2 comprising the amino acid sequence of SEQ ID NO: 94, and a HCDR3 comprising the amino acid sequence of SEQ ID NO: 111; and a VL comprising a LCDR1 comprising the amino acid sequence of SEQ ID NO: 127, a LCDR2 comprising the amino acid sequence of KIS, and a LCDR3 comprising the amino acid sequence of SEQ ID NO: 1286;
(vi) a VH comprising a HCDR1 comprising the amino acid sequence of SEQ ID NO: 88, a HCDR2 comprising the amino acid sequence of SEQ ID NO: 105, and a HCDR3 comprising the amino acid sequence of SEQ ID NO: 123; and a VL comprising a LCDR1 comprising the amino acid sequence of SEQ ID NO: 1279, a LCDR2 comprising the amino acid sequence of WAS, and a LCDR3 comprising the amino acid sequence of SEQ ID NO: 1298; or
(vii) a VH comprising a HCDR1, a HCDR2, and an HCDR3, and a VL comprising a LCDR1, a LCDR2, and a LCDR3, wherein the HCDR1, HCDR2, HCDR3, LCDR1, LCDR2, and LCDR3 each comprise the amino acid sequences of any of the HCDR and LCDR sequences provided in Table 1.

2. The AAV viral genome of claim 1, wherein:
(i) the VH comprises the amino acid sequence of any one of SEQ ID NOs: 11, 1142, 1143, 1140, 3, or 15, or an amino acid sequence having at least 90%, 92%, 95%, 96%, 97%, 98%, or 99% sequence identity thereto;
(ii) the VH comprises the amino acid sequence of any one of SEQ ID NOs: 11, 1142, 1143, 1140, 3, or 15, or an amino acid sequence comprising at least one, two or three modifications, but not more than 30, 20 or 10 modifications relative to the amino acid sequence of any one of SEQ ID NOs: 11, 1142, 1143, 1140, 3, or 15; or
(iii) the VH comprises an amino acid sequence of any VH provided in Table 1, or an amino acid sequence at least 90%, 92%, 95%, 96%, 97%, 98%, or 99% identical thereto; or an amino acid sequence having at least one, two or three modifications, but not more than 30, 20 or 10 modifications of the amino acid sequence of any VH provided in Table 1.

3. The AAV viral genome of claim 1 or 2, wherein:
(i) the VL comprises the amino acid sequence of any one of SEQ ID NOs: 30, 24, 25, 22, 21, or 35, or an amino acid sequence having at least 90%, 92%, 95%, 96%, 97%, 98%, or 99% sequence identity thereto;
(ii) the VL comprises the amino acid sequence of any one of SEQ ID NOs: 30, 24, 25, 22, 21, or 35, or an amino acid sequence comprising at least one, two or three modifications, but not more than 30, 20 or 10 modifications relative to the amino acid sequence of any one of SEQ ID NOs: 30, 24, 25, 22, 21, or 35; or
(iii) the VL comprises an amino acid sequence of any VL provided in Table 1, or an amino acid sequence at least 90%, 92%, 95%, 96%, 97%, 98%, or 99% identical thereto; or an amino acid sequence having at least one, two or three modifications, but not more than 30, 20 or 10 modifications of the amino acid sequence of any VL provided in Table 1.

4. The AAV viral genome of any one of claims 1-3, wherein:
(i) the VH comprises the amino acid sequence of SEQ ID NO: 11, or an amino acid sequence at least 90%, 92%, 95%, 96%, 97%, 98%, or 99% identical thereto; and the VL comprises the amino acid sequence of SEQ ID NO: 30, or an amino acid sequence at least 90%, 92%, 95%, 96%, 97%, 98%, or 99% identical thereto;
(ii) the VH comprises the amino acid sequence of SEQ ID NO: 1142, or an amino acid sequence at least 90%, 92%, 95%, 96%, 97%, 98%, or 99% identical thereto; and the VL comprises the amino acid sequence of SEQ ID NO: 24, or an amino acid sequence at least 90%, 92%, 95%, 96%, 97%, 98%, or 99% identical thereto;
(iii) the VH comprises the amino acid sequence of SEQ ID NO: 1143, or an amino acid sequence at least 90%, 92%, 95%, 96%, 97%, 98%, or 99% identical thereto; and the VL comprises the amino acid sequence of SEQ ID NO: 25, or an amino acid sequence at least 90%, 92%, 95%, 96%, 97%, 98%, or 99% identical thereto;
(iv) the VH comprises the amino acid sequence of SEQ ID NO: 1140, or an amino acid sequence at least 90%, 92%, 95%, 96%, 97%, 98%, or 99% identical thereto; and the VL comprises the amino acid sequence of SEQ ID NO: 22, or an amino acid sequence at least 90%, 92%, 95%, 96%, 97%, 98%, or 99% identical thereto;
(v) the VH comprises the amino acid sequence of SEQ ID NO: 3, or an amino acid sequence at least 90%, 92%, 95%, 96%, 97%, 98%, or 99% identical thereto; and the VL comprises the amino acid sequence of SEQ ID NO: 21, or an amino acid sequence at least 90%, 92%, 95%, 96%, 97%, 98%, or 99% identical thereto;
(vi) the VH comprises the amino acid sequence of SEQ ID NO: 15, or an amino acid sequence at least 90%, 92%, 95%, 96%, 97%, 98%, or 99% identical thereto; and the VL comprises the amino acid sequence of SEQ ID NO: 35, or an amino acid sequence at least 90%, 92%, 95%, 96%, 97%, 98%, or 99% identical thereto; or
(vii) the VH comprises the amino acid sequence of any one of the VH sequences provided in Table 1, or an amino acid sequence at least 90%, 92%, 95%, 96%, 97%, 98%, or 99% identical thereto; and the VL comprises the amino acid sequence of any one of the VL sequences provided in Table 1, or an amino acid sequence at least 90%, 92%, 95%, 96%, 97%, 98%, or 99% identical thereto.

5. The AAV viral genome of any one of claims 1-4, wherein:
(i) the nucleotide sequence encoding the VH comprises any one of SEQ ID NOs: 47, 52, 51, 54, 55, or 43; a nucleotide sequence at least 90%, 92%, 95%, 96%, 97%, 98%, or 99% identical to any one of any one of SEQ ID NOs: 47, 52, 51, 54, 55, or 43; or a nucleotide sequence comprising one, two, or three but no more than 30, 20 or 10 different nucleotides relative to any one of SEQ ID NOs: 47, 52, 51, 54, 55, or 43; and/or the nucleotide sequence encoding the VL comprises any one of SEQ ID NOs: 66, 72, 71, 74, 75, or 61; a nucleotide sequence at least 90%, 92%, 95%, 96%, 97%, 98%, or 99% identical to any one of any one of SEQ ID NOs: 66, 72, 71, 74, 75, or 61; or a nucleotide sequence comprising one, two, or three but no more than 30, 20 or 10 different nucleotides relative to any one of SEQ ID NOs: 66, 72, 71, 74, 75, or 61; or
(ii) the nucleotide sequence encoding the VH comprises the nucleotide sequence of any VH provided in Table 1, or a nucleotide sequence having at least 90%, 92%, 95%, 96%, 97%, 98%, or 99% sequence identity thereto; and/or the nucleotide sequence encoding the VL comprises the nucleotide sequence of any VL provided in Table 1, or a nucleotide sequence having at least 90%, 92%, 95%, 96%, 97%, 98%, or 99% sequence identity thereto.

6. The AAV viral genome of any one of claims 1-5, wherein:
(i) the nucleotide sequence encoding the VH comprises the nucleotide sequence of SEQ ID NO: 47, or a nucleotide sequence having at least 90%, 92%, 95%, 96%, 97%, 98%, or 99% sequence identity thereto; and the nucleotide sequence encoding the VL comprises the nucleotide sequence of SEQ ID NO: 66, or a nucleotide sequence having at least 90%, 92%, 95%, 96%, 97%, 98%, or 99% sequence identity thereto;
(ii) the nucleotide sequence encoding the VH comprises the nucleotide sequence of SEQ ID NO: 52, or a nucleotide sequence having at least 90%, 92%, 95%, 96%, 97%, 98%, or 99% sequence identity thereto; and the nucleotide sequence encoding the VL comprises the nucleotide sequence of SEQ ID NO: 72, or a nucleotide sequence having at least 90%, 92%, 95%, 96%, 97%, 98%, or 99% sequence identity thereto;
(iii) the nucleotide sequence encoding the VH comprises the nucleotide sequence of SEQ ID NO: 51, or a nucleotide sequence having at least 90%, 92%, 95%, 96%, 97%, 98%, or 99% sequence identity thereto; and the nucleotide sequence encoding the VL comprises the nucleotide sequence of SEQ ID NO: 71, or a nucleotide sequence having at least 90%, 92%, 95%, 96%, 97%, 98%, or 99% sequence identity thereto;
(iv) the nucleotide sequence encoding the VH comprises the nucleotide sequence of SEQ ID NO: 54, or a nucleotide sequence having at least 90%, 92%, 95%, 96%, 97%, 98%, or 99% sequence identity thereto; and the nucleotide sequence encoding the VL comprises the nucleotide sequence of SEQ ID NO: 74, or a nucleotide sequence having at least 90%, 92%, 95%, 96%, 97%, 98%, or 99% sequence identity thereto;
(v) the nucleotide sequence encoding the VH comprises the nucleotide sequence of SEQ ID NO: 55, or a nucleotide sequence having at least 90%, 92%, 95%, 96%, 97%, 98%, or 99% sequence identity thereto; and the nucleotide sequence encoding the VL comprises the nucleotide sequence of SEQ ID NO: 75, or a nucleotide sequence having at least 90%, 92%, 95%, 96%, 97%, 98%, or 99% sequence identity thereto; or
(vi) the nucleotide sequence encoding the VH comprises the nucleotide sequence of SEQ ID NO: 43, or a nucleotide sequence having at least 90%, 92%, 95%, 96%, 97%, 98%, or 99% sequence identity thereto; and the nucleotide sequence encoding the VL comprises the nucleotide sequence of SEQ ID NO: 61, or a nucleotide sequence having at least 90%, 92%, 95%, 96%, 97%, 98%, or 99% sequence identity thereto.

7. The AAV viral genome of any one of claims 1-6, wherein the encoded antibody is a full length antibody, a bispecific antibody, an Fab, an F(ab′)₂, an Fv, or a single chain Fv fragment (scFv).

8. The AAV viral genome of any one of claims 1-7, wherein the encoded antibody is a human antibody.

9. The AAV viral genome of any one of claims 1-8, wherein encoded antibody comprises:
(i) a human IgG1 heavy chain constant region, a human IgG2 heavy chain constant region, a human IgG3 heavy chain constant region, or a human IgG4 heavy chain constant region; and/or a human kappa light chain constant region, or a human lambda light chain constant region;
(ii) a human IgG1 heavy chain constant region a human kappa light chain constant region;
(iii) a heavy chain constant region comprising the amino acid sequence of SEQ ID NO: 1401 or an amino acid sequence at least 90%, 92%, 95%, 96%, 97%, 98%, or 99% identical thereto; and a light chain constant region comprising the amino acid sequence of SEQ ID NO: 1403; or
(iv) a heavy chain constant region comprising the amino acid sequence of SEQ ID NO: 1401 or an amino acid sequence at least 90%, 92%, 95%, 96%, 97%, 98%, or 99% identical thereto; and a light chain constant region comprising the amino acid sequence of SEQ ID NO: 1402.

10. The AAV viral genome of any one of claims 1-9, wherein the encoded antibody:
(i) does not bind to non-pathological tau, binds to pathological tau tangles, and/or inhibits tau aggregation;
(ii) binds to a tau protein at a half maximal effective concentration (EC50) of from about 0.001 nM to about 10 nM, or about 0.01 nM to about 2 nM, e.g., as assessed by direct enzyme-linked immunosorbent assay (ELISA);
(iii) binds to enriched paired helical filament tau protein (ePHF), e.g., at a half maximal effective concentration (EC50) of from about 0.001 nM to about 100 nM, or about 0.01 nM to about 20 nM e.g., as assessed by direct enzyme-linked immunosorbent assay (ELISA);
(iv) binds to iPHF with a dissociation constant (K_{D}) of about 0.1 to about 10 nM, or about 0.2-5 nM, e.g., as assessed by bio-layer interferometry;
(v) binds to a tau protein epitope comprising a region formed by a complex of at least two tau proteins;
(vi) binds to a mid-domain of a tau protein;
(vii) binds to all or a portion of amino acid residues of tau selected from: (a) 183-212, (b) 187-218, (c) 33-82, 159-182, 197-226, and 229-246; (d) 217-242, (e) 35-76 and 187-218, (f) 5-34, (g) 187-218, (h) 33-82, 159-188, and 191-230, (i) 35-62, 107-124, and 203-220, 0) 35-82, 159-188, and 197-224, or (k) 53-78, 329-348, and 381-408, wherein human tau is numbered according to SEQ ID NO: 1404, optionally wherein one or more of the serines, threonines, and/or tyrosines in the stretch of amino acids selected from (a)-(k) are phosphorylated, optionally wherein all of the serines, threonines, and/or tyrosines in the stretch of amino acids selected from (a)-(k) are phosphorylated; and/or
(viii) binds to pT231 of tau, numbered according to SEQ ID NO: 1404.

11. The AAV viral genome of any one of claims 1-10, wherein the encoded antibody binds to:
(a) all or a portion of amino acids 195-215 of tau with a dissociation constant (KD) of about 1 pM to about 50 pM, or about 1-25 pM, e.g., as assessed by bio-layer interferometry;
(b) all or a portion of amino acids 191-214 of tau phosphorylated at S199 (numbered according to SEQ ID NO: 1404) with a dissociation constant (KD) of about 0.1 nM to about 10 nM, or about 0.5-5 nM, e.g., as assessed by bio-layer interferometry;
(c) all or a portion of amino acids 217-234 of tau phosphorylated at T217, T220, and T231 (numbered according to SEQ ID NO: 1404) with a dissociation constant (KD) of about 0.1 nM to about 10 nM, or about 0.1-5 nM, e.g., as assessed by bio-layer interferometry; or
(d) all or a portion of amino acids 225-240 of tau phosphorylated at T231 (numbered according to SEQ ID NO: 1404) with a dissociation constant (KD) of about 0.1 nM to about 25 nM, or about 0.1-15 nM, e.g., as assessed by bio-layer interferometry.

12. The AAV viral genome of any one of claims 1-11, wherein:
(i) the sequences of the encoded VH and VL are connected directly (e.g., without a linker); or
(ii) the sequences of the encoded VH and VL are connected via a linker, optionally, wherein the linker comprises the nucleotide sequence of any of the linker sequences provided in Table 41A, or a nucleotide sequence at least 95% identical thereto.

13. The AAV viral genome of any one of claims 1-12, which further encodes a first signal sequence, and optionally a second signal sequence, optionally wherein the nucleotide sequence encoding the first signal sequence and/or the nucleotide sequence encoding the second signal sequence each comprises the nucleotide sequence of any one of the signal sequences provided in Table 11A, or a nucleotide sequence at least 95% identical thereto.

14. The AAV viral genome of claim 13, wherein:
(i) the nucleotide sequence encoding the signal sequence is present 5′ relative to the nucleotide sequence encoding the VH; and/or
(ii) the nucleotide sequence encoding the signal sequence is present 5′ relative to the nucleotide sequence encoding the VL.

15. The AAV genome of any one of claims 1-14, wherein the nucleic acid encoding the antibody is operably linked to a promoter.

16. The AAV viral genome of claim 15, wherein the promoter is a ubiquitous promoter or a tissue specific promoter.

17. The AAV viral genome of claim 15 or 16, wherein the promoter:
(i) is a human elongation factor 1α-subunit (EF1α) promoter, cytomegalovirus (CMV) immediate-early enhancer and/or promoter, chicken β-actin (CBA) and its derivative CAG promoter, a CBA promoter, a β glucuronidase (GUSB) promoter, a ubiquitin C (UBC) promoter, a neuron-specific enolase (NSE) promoter, a platelet-derived growth factor (PDGF) promoter, a platelet-derived growth factor B-chain (PDGF-β) promoter, a intercellular adhesion molecule 2 (ICAM-2) promoter, a synapsin (Syn) promoter, a methyl-CpG binding protein 2 (MeCP2) promoter, a Ca2+/calmodulin-dependent protein kinase II (CaMKII) promoter, a metabotropic glutamate receptor 2 (mGluR2) promoter, a neurofilament light (NFL) or heavy (NFH) promoter, a glial fibrillary acidic protein (GFAP) promoter, myelin basic protein (MBP) promoter, or a fragment, e.g., a truncation, or a functional variant thereof; or
(ii) comprises the nucleotide sequence of any one of the promoter sequences provided in Table 8A, or a nucleotide sequence at least 95% identical thereto.

18. The AAV viral genome of any one of claims 1-17, which further comprises an enhancer, optionally wherein the enhancer is a CMVie enhancer.

19. The AAV viral genome of any one of claims 1-18, which further comprises:
(i) a polyA signal sequence;
(ii) an inverted terminal repeat (ITR) sequence, optionally wherein the ITR sequence is positioned 5′ relative to the nucleic acid encoding the antibody and/or the ITR sequence is positioned 3′ relative to the nucleic acid encoding the antibody
(iii) a Kozak sequence;
(iv) at least one, two, or three intron regions;
(v) at least one, two, or three exon regions; and/or
(iv) a nucleotide sequence encoding a miR binding site, e.g., a miR binding site that modulates, e.g., reduces, expression of the antibody molecule encoded by the viral genome in a cell or tissue where the corresponding miRNA is expressed, optionally wherein the encoded miR binding site modulates, e.g., reduces, expression of the encoded antibody molecule in a cell or tissue of the DRG, liver, heart, hematopoietic lineage, or a combination thereof.

20. The AAV viral genome of claim 19, wherein
(i) the polyA signal sequence comprises the nucleotide sequence of any one of SEQ ID NOs: 2122-2124, a nucleotide sequence comprising at least one, two, or three but no more than four modifications, e.g., substitutions, insertions, or deletions, relative to the nucleotide sequence of SEQ ID NOs: 2122-2124, or a nucleotide sequence with at least 95%, 96%, 97%, 98%, or 99% sequence identity to any one of SEQ ID NOs: 2122-2124;
(ii) the ITR sequence comprises the nucleotide sequence of any one of SEQ ID NOs: 2076-2079, a nucleotide sequence comprising at least one, two, or three but no more than four modifications, e.g., substitutions, insertions, or deletions, relative to the nucleotide sequence of SEQ ID NOs: 2076-2079, or a nucleotide sequence with at least 95%, 96%, 97%, 98%, or 99% sequence identity to any one of SEQ ID NOs: 2076-2079;
(iii) the at least one, two, or three intron regions each comprise the nucleotide sequence of an intron region provided in Table 67a, or a nucleotide sequence with at least 95%, 96%, 97%, 98%, or 99% sequence identity thereto; and/or
(iv) the at least one, two, or three intron regions each comprise the nucleotide sequence of an exon region provided in Table 66a, or a nucleotide sequence with at least 95%, 96%, 97%, 98%, or 99% sequence identity thereto.

21. The AAV viral genome of any one of claims 1-20, which comprises:
(i) at least 1-5 copies of the encoded miR binding site, e.g., at least 1, 2, 3, 4, or 5 copies;
(ii) at least 3 copies of an encoded miR binding sites, optionally wherein:
(a) all three copies comprise the same miR binding site, or at least one, two, three, or all of the copies comprise a different miR binding site; and/or
(b) the 3 copies of the encoded miR binding sites are continuous (e.g., not separated by a spacer), or are separated by a spacer, optionally wherein the spacer comprises the nucleotide sequence of GATAGTTA, or a nucleotide sequence having at least one, two, or three modifications, e.g., substitutions, but no more than four modifications, e.g., substitutions, relative to GATAGTTA; or
(iii) at least 4 copies of an encoded miR binding site, optionally wherein
(a) all four copies comprise the same miR binding site, or at least one, two, three, or all of the copies comprise a different miR binding site; and/or
(b) the 4 copies of the encoded miR binding sites are continuous (e.g., not separated by a spacer), or are separated by a spacer, optionally wherein the spacer comprises the nucleotide sequence of GATAGTTA, or a nucleotide sequence having at least one, two, or three modifications, e.g., substitutions, but no more than four modifications, e.g., substitutions, relative to GATAGTTA.

22. The AAV viral genome of claim 20 or 21, wherein the encoded miR binding site comprises a miR122 binding site, a miR183 binding site, a miR-1 binding site, a miR-142-3p binding site, a miR182 binding site, a miR96 binding site, or a combination thereof, optionally wherein:
(i) the encoded miR122 binding site comprises the nucleotide sequence of SEQ ID NO: 4673 or 4674, or a nucleotide sequence substantially identical (e.g., having at least 70%, 75%, 80%, 85%, 90%, 92%, 95%, 97%, 98%, or 99% sequence identity) thereto; or a nucleotide sequence having at least one, two, three, four, five, six, or seven modifications, e.g., substitutions, but no more than ten modifications, e.g., substitutions, relative to SEQ ID NO: 4673 or 4674;
(ii) the encoded miR183 binding site comprises the nucleotide sequence of SEQ ID NO: 4676, or a nucleotide sequence substantially identical (e.g., having at least 70%, 75%, 80%, 85%, 90%, 92%, 95%, 97%, 98%, or 99% sequence identity) thereto; or a nucleotide sequence having at least one, two, three, four, five, six, or seven modifications, e.g., substitutions, but no more than ten modifications, e.g., substitutions, relative to SEQ ID NO: 4676;
(iii) the encoded miR-1 binding site comprises the nucleotide sequence of SEQ ID NO: 4679, or a nucleotide sequence substantially identical (e.g., having at least 70%, 75%, 80%, 85%, 90%, 92%, 95%, 97%, 98%, or 99% sequence identity) thereto; or a nucleotide sequence having at least one, two, three, four, five, six, or seven modifications, e.g., substitutions, but no more than ten modifications, e.g., substitutions, relative to SEQ ID NO: 4679;
(iv) the encoded miR-142-3p binding site comprises the nucleotide sequence of SEQ ID NO: 4675, or a nucleotide sequence substantially identical (e.g., having at least 70%, 75%, 80%, 85%, 90%, 92%, 95%, 97%, 98%, or 99% sequence identity) thereto; or a nucleotide sequence having at least one, two, three, four, five, six, or seven modifications, e.g., substitutions, but no more than ten modifications, e.g., substitutions, relative to SEQ ID NO: 4675;
(v) the encoded miR-182 binding site comprises the nucleotide sequence of SEQ ID NO: 4677, or a nucleotide sequence substantially identical (e.g., having at least 70%, 75%, 80%, 85%, 90%, 92%, 95%, 97%, 98%, or 99% sequence identity) thereto; or a nucleotide sequence having at least one, two, three, four, five, six, or seven modifications, e.g., substitutions, but no more than ten modifications, e.g., substitutions, relative to SEQ ID NO: 4677; and/or
(vi) the encoded miR96 binding site comprises the nucleotide sequence of SEQ ID NO: 4678, or a nucleotide sequence substantially identical (e.g., having at least 70%, 75%, 80%, 85%, 90%, 92%, 95%, 97%, 98%, or 99% sequence identity) thereto; or a nucleotide sequence having at least one, two, three, four, five, six, or seven modifications, e.g., substitutions, but no more than ten modifications, e.g., substitutions, relative to SEQ ID NO: 4678.

23. The AAV viral genome of any one of claims 1-23, which comprises from 5′ to 3′:
(i) a first ITR sequence;
(ii) an enhancer;
(iii) a promoter;
(iv) optionally, an intron;
(v) a nucleotide sequence encoding a first signal sequence;
(vi) a nucleotide sequence encoding the VH;
(vii) a nucleotide sequence encoding a heavy chain constant region;
(viii) a first linker;
(ix) optionally a second linker;
(x) a nucleotide sequence encoding a second signal sequence;
(xi) a nucleotide sequence encoding the VL;
(xii) a nucleotide sequence encoding a light chain constant region;
(xiii) a polyA signal sequence; and/or
(xiv) a second ITR sequence.

24. The AAV viral genome of any one of claims 1-23, which is self-complementary or single-stranded.

25. The AAV viral genome of any one of claims 1-24, which further comprises a nucleic acid encoding a Rep protein, e.g., a non-structural protein, wherein the Rep protein comprises a Rep78 protein, a Rep68 protein, a Rep52 protein, and/or a Rep40 protein, optionally wherein the Rep78 protein, a Rep68 protein, a Rep52 protein, and/or a Rep40 protein are encoded by at least one Rep gene.

26. An AAV particle comprising the AAV viral genome of any one of claims 1-25, and an AAV capsid protein.

27. The AAV particle of claim 26, wherein the AAV capsid protein comprises:
(i) an AAV9 capsid protein or variant thereof or an AAV5 capsid protein or variant thereof;
(ii) any of the AAV capsid proteins listed in Table 1A, 37A, 38A, or 39A, or a functional variant thereof, e.g., the amino acid sequence of any one of the AAV capsid proteins provided in Tables 1A, 37A, 38A, or 39A, or an amino acid sequence having at least 90%, 95%, or 99% identity thereto.

28. A host cell comprising the AAV viral genome of any one of claims 1-25 or the AAV particle of claim 26 or 27.

29. The host cell of claim 28, which is an insect cell, a bacterial cell or a mammalian cell.

30. A method of making an AAV particle, comprising:
(i) providing a host cell comprising the viral genome of any one of claims 1-25 or the host cell of claim 28 or 29; and
(ii) incubating the host cell under conditions suitable to enclose the viral genome in an AAV capsid, protein, e.g., an AAV capsid variant, e.g., as provided in Tables 1A, 37A, 38A, or 39A;
thereby making the AAV particle.

31. A pharmaceutical composition comprising the AAV viral genome of any one of claims 1-25 or the AAV particle of claim 26 or 27, and a pharmaceutically acceptable excipient.

32. A method of delivering an antibody that binds to tau to a subject, comprising administering to the subject an effective amount of the pharmaceutical composition of claim 31, an AAV particle comprising the AAV viral genome of any one of claims 1-25, or the AAV particle of claim 26 or 27, thereby delivering the antibody that binds to tau to the subject.

33. The method of claim 32, wherein:
(i) the subject has, has been diagnosed with having, or is at risk of having a disease associated with expression of tau;
(ii) the subject has, has been diagnosed with having, or is at risk of having a neurological, e.g., neurodegenerative disorder; and/or,
(iii) the subject has, has been diagnosed with having, or is at risk of having a tauopathy.

34. A method of treating a subject having or diagnosed with having a neurological or neurodegenerative disorder, e.g., a tauopathy, comprising administering to the subject an effective amount of the pharmaceutical composition of claim 31, an AAV particle comprising the AAV viral genome of any one of claims 1-25, or the AAV particle of claim 26 or 27, thereby treating the neurological or neurodegenerative disorder in the subject.

35. The method of claim 33 or 34, wherein the neurological or neurodegenerative disorder comprises:
(i) a tauopathy; and/or
(ii) AD, FTDP-17, FTLD, FTD, CTE, PSP, Down's syndrome, Pick's disease, CBD, Corticobasal syndrome, ALS, Prion diseases, CJD, Multiple system atrophy, Tangle-only dementia, or Progressive subcortical gliosis.

36. The method of any one of claims 32-35, the AAV particle or pharmaceutical composition is administered to the subject intravenously, intramuscularly, via intraparenchymal administration, intracerebroventricularly, via intra-cisterna magna (ICM) injection, or intrathecally.

37. The method of any one of claims 32-36, further comprising administration of an additional therapeutic agent and/or therapy suitable for treatment or prevention of a neurological or neurodegenerative disorder, e.g., a tauopathy.

38. The method of claim 37, wherein the additional therapeutic agent and/or therapy comprises a cholinesterase inhibitor (e.g., donepezil, rivastigmine, and/or galantamine), an N-methyl D-aspartate (NMDA) antagonist (e.g., memantine), an antipsychotic drug, an anti-anxiety drug, an anticonvulsant, a dopamine agonist (e.g., pramipexole, ropinirole, rotigotine, and/or apomorphine), an MAO B inhibitor (e.g., selegiline, rasagiline, and/or safinamide), catechol O-methyltransferase (COMT) inhibitors (entacapone, opicapone, and/or tolcapone), anticholinergics (e.g., benztropine and/or trihexyphenidyl), amantadine, carbidopa-levodopa, deep brain simulation (DBS), or a combination thereof.

39. The AAV viral genome of any one of claims 1-25, the AAV particle of claim 26 or 27, or the pharmaceutical composition of claim 31, for use in the manufacture of a medicament.

40. The AAV viral genome of any one of claims 1-25, the AAV particle of claim 26 or 27, or the pharmaceutical composition of claim 31, for use in a method of delivering an antibody that binds to tau to subject.

41. The AAV viral genome of any one of claims 1-25, the AAV particle of claim 26 or 27, or the pharmaceutical composition of claim 31, for use in a method of treating a neurological or neurodegenerative disorder, e.g., a tauopathy, in a subject.

42. Use of the AAV viral genome of any one of claims 1-25, the AAV particle of claim 26 or 27, or the pharmaceutical composition of claim 31, in the manufacture of a medicament.

43. Use of the AAV viral genome of any one of claims 1-25, the AAV particle of claim 26 or 27, or the pharmaceutical composition of claim 31, in the manufacture of a medicament for delivering an antibody that binds to tau to a subject.

44. Use of the AAV viral genome of any one of claims 1-25, the AAV particle of claim 26 or 27, or the pharmaceutical composition of claim 31, in the manufacture of a medicament for treating a neurological or neurodegenerative disorder, e.g., a tauopathy, in a subject.
